United States Patent Application Publication US 2024/0268394 A1 - sequence listing, part 5

SEQ ID NO: 59 - DNA, 700469 bp, Pseudomonas nodulensis
  misc_feature (66549)..(66561): n is a, c, g, or t
  misc_feature (75716)..(75792): n is a, c, g, or t
  misc_feature (221622)..(221635): n is a, c, g, or t
  misc_feature (236309)..(236309): n is a, c, g, or t
  misc_feature (236318)..(236318): n is a, c, g, or t
  misc_feature (281714)..(281799): n is a, c, g, or t
  misc_feature (624935)..(624975): n is a, c, g, or t
ccagagccagagcaaaccacccttcaactgatacatgaagatcaaactgtgggagggggcttgcccccgatggcggtgtgtcagccaactcatcagtgacgacccactgccatcgggggcaagccccctcccacaggggaatgcatttcaacatgtgggagggggcttgcccccgatacaggcgactcgatccatcagatgttctggcgatcgcctttcgggtcgaagaacaccgaagaaacaatctccgcctcgatcacgctgccatcggcctgcggtgagaacacccgctcgccgatgcgcttcaagccgcccttcaccaccgccatcgcgaacgaatagccgagggagttgtgggcatagcttgaggtgacgtgaccgaccatcttcatcgggatcgactgcttcggatcaaacaccagttgcgcgccttccggcagccacaccttcggatcgaccggcttcaagcccaccagttgcttacgctcttcacgcacgcagtcttcacggttcatgccgcgccagccgatccacgagaacggtttggtgcggcccacacaccagcccatgttcaggtcgtccggggtcatcgagccgtcggtgtcctggccgacaatgatgaagcccttctcggcccgcagcacgtgcatggtctcggtgccgtacggcgtcaggttgtacttcttgccggcgtcgacaattttttccagcacgcccatggcgtagtcggcctgcacgttgatttcgtacgacagctcaccggtaaacgaaatgcggaacacccgcgccggtacgccgcccaccaggccttccttccaggtcatgaacggaaaaccgtccttgtccaggtcgatgtcggtgacttcggccagcagcttgcggctgttggggccagacagcgtcatggtcgcccagtggtcggtgaccgaggtgaagtacaccttgaggtctggccattcggtctgttggtagatttccagccactgcagcacgcgtgccgcgccgccagtggtggtggtcatcaggaagtggttgtcggccaggcaggcagtcacgccgtcgtcgaagaccatgccgtcttccttgcacatcaggccgtagcgcgccttgcccacgtcgagcttggtccaggcgttggtgtagatgcggttgaggaactcccgcgcgtcggggccctggatgtcgatcttgccgagggtggacgcgtccagcaggccgacgctgtcgcgtacggccaggcattcgcgcttgactgcggcgtgcaggtcttcaccgttgcgtgggaagtaccacgggcgtttccactggccgacatcttcaaactcggcgccgttcttcacgtgccaggcgtgcagcgcggtgtagcgcaccggctcgaagatgtgcccacagtgacggcccgctaccgcgccaaaggtgaccggcgtgtagttgggacggaacatggtggtgcccatctgcgggatggtcacgttcagcgaacgggcggcaatggccaggccgttgacgttgcccagcttgccctggtcggtaccgaagcccagcgcggtgtagcgcttgacgtgctcgaccgactcgaaaccttcgcgggtcgccagttcgatggcggcggcggtcacgtcgttctgcaggtcgacgaattgcttcggcgctcgtgctgtgggcttgtcgtgtggcacttggtaaatagccaaagtcggctcttccaggcggctcaaggcttttggcaaggtaccttccacgggcgcgaaaccggcttcgctggcagcgcgcacgccgccttcaaaaccatccgccagggagtcgccaaggccgtagacgccgttgatgccaccgacgcacacgcgtttctgcggggcttcgcccggtacaaaaccgaggatatcttcacgccaggtcggcttgccgcccaggtgcgaagccaggtggaccaccgggctgtagccgccggagctggctaccaggtcacactccagccattcacctgggctggtgactttatgcgctttcacatcgatcgcggccacgcgggcggcggtcacgtgcttgctgccacgggcttcgatcacggcgctgccggtgaggatacgaatgcctttggcgcgggcctcttccaccagcgcaccacgtgggttgtggcgcacatcggccaccgccaccactgcaaggcccgcatcgagccagtccagcgcaacgcggtaggcgtggtcgttgttggtcgacagcaccagtttcttgccgggtgccacgccgtagcgacgtacgtaggtggagaccgcaccggccagcatgttgcccggcacgtcgttgttgccgtacaccagcggacgctcgcacgcaccggtcgccagcaccacacgcttggcgcgcacccggtggatacgctggcgtaccacgccaatcggcgcacggtcaccgaggtggtcggtgaggcgttcgtgaatggtcagaaagttatggtcgtggtagccgttgacagtggcacgaggcagcagcaccacgtccggcagcgctttcaattcagcgatgacgctggcaacccattcagccgctggcttgccgtcgaggttttcacgcgaatccagcagcgaaccgccgaactcttcctgctcgtcggcgaggatcacgcgagccccaccgcgggcggcggccagtgcggcagccaggccagcagggccggcgccgacgaccagcacgtcacagtgacggttgaagttgtcgtaggtgtccggatcgttctcggtcggcgagcggccaagaccggcggccttgcgaatgtacttctcgtaagtcatccagaacgattgcgggtacatgaaggttttgtagtagaaccccggcggcatcagcttgccgccgaccttgccgaggatgcccatcacgtcattgttgacgttcggccagccgttggtgctggtggctaccaggccctggtacagcgcctgttgcgtggcgcgcacgttcggaatctgggtggcttcggtggcaccgatctgcagcaccgcgttcggctcttcggcgcccgcagcgaaaatgccgcgaggacgcgagtacttgaagctgcggccgataatgtcgacgccgttggccagcagggcggcggccagtgtgtcgccttcaaagcctttgtaggtctggccgttgaaagtaaacgtcaggactttattacggtcgatccggccaccgttggacaggcgattggtctggctcataccttctctccagaggccttggcggtgaattgtggcttctcaccgatcttgtaggtttcaagaatttcgtaggtcagggtgtcgcgggtcgcgttgaagtactggcggcagccggcggcgtggatccacagctcgtggtgcaggccacgcgggttgtcacggaagaacatgtagtcgccccactcttcatcggtgcaggcattcgggtccagcgggcgcggaatgtgcgcttggccggacgcgtggaattcctcttcggagcgcagttcgccacagtgaggacagaagatatgcaacatagggaatttctcctgttagtgggcgacggccgcagcgccgtgttcgtcgatcaacgcaccgttgtggaaacggtcgatggagaaaggtgctgccaatgggtgcatttcacccttggccaggctggcggcaaacacgttgcccgagcccggcgtggccttgaagccaccggtgccccaaccgcagttgaagaacatgttcggcaccggagtcttggagatgatcgggcaggcatccggcgtggtgtcgacgatgccgccccactggcggttcatgcgcacgcgggacagcaccgggaacatctcgacgatggcctggatggtgtgttcgatcaccgggtacgagccgcgctggccgtagccgttgtagccgtcgataccggcgccgatcaccaggtcgcccttgtcggactggctgatgtagccgtgcacggcgttagacatgatcacgctgtcgataatcggcttgatcggctccgacaccagcgcttgcagcgggtgggattcgatcggcaggcggaaaccggcgagcgaagccatgtgcccggagttaccggcagtgactacaccgacgcgcttggcgccgataaaacccttgttggtttccacgccgatgcacacgccgttttccttgcggaagccgatcacttcggtctgctggatcaagtccacgccgagggcgtcagcggcacgcgcgaagccccaggccacggcatcgtgacgggccacgccgccgcgccgttgcacggtggcgccgagtactggatagcgggtgttcttggagcagtcgaggtacggaatctcgtcggccacttgcttggcgttgagcagttcgccgtccacgccgttgaggcggttggcactcacgcggcgctcggaatcacggatgtcctgcaaggtgtggcacaggttgtacacgccacgctgggaaaacatcacgttgtagttcaggtcctgggacaggccctcccacagtttcatcgcgtgctcatacaggtgcgccgactcgtcccacaggtagttggaacgcacgatggtggtgttgcgcgcggtgttaccgccgcccagccagcctttctcgaccacggccacgttggtgatgccgtgctctttggccaggtaataggcggtcgccagaccatgcccgccgccgccgacgatgaccacgtcgtagaccttcttgggggtcggcgtgcgccacatcttctgccagttttcgtggtggctgagggagtgcttgaagaggccgaagcccgagtagcgttgcatagtcattactccaaaaccgcgctcagcgataaaccgggaaatcagcgcacagggcagacacgtgcttggccacgttggcctcgacatcggcgtcgccgaggttgtcgaggatgtcgcagatccagccggccagttcgatgcactgcggcactttgaaaccacgcgtggtcaccgccggggtgccgatgcgcaggcccgaggtcacgaacggcgactgcgggtcattcggcacggcgttcttgttgacggtgatgtgggcgcgaccgagggcggcgtccgcctctttgccggtgaggccctgacggatcaggctgaccaggaacaggtggttatcagtgccgccggacactacatcgtagccgcgtttgataaacacgctggccatggcctgggcgttgtcgatcacttgttgttggtaagccttgaagcctggctccagcgcttccttgaagcacacggccttgccggcgatgacgtgcatcagcgggccgccctgggcgccggggaatacggcggcgttgagtttcttttcaatttcttcgttggacttggccaggatcaggccgccgcgaggaccgcgcagggtcttgtgggtggtggtggtgaccacatcggcgtagggcagcgggttcgggtacaggccggcggcaaccaggccggcgacgtgggccatgtcgacgaacagcagcgcgcccactttgtccgcgatctgacggaagcgtgggaaatccagggtcttggagtaggcggagaaaccggccacgaccattttcggcttgtgttcgacggccaggcgctcgacttcgtcgtagtcgatcaggccggtgtcggtgttgatgccgtactgcaccgcgttgtacagcttgcccgaggacgacactttggcgccgtgggtcaagtgaccgccgtgggccaggctcatgcccaggatggtgtcgccggcattgatcagcgccaggtacaccgcgctgttggcggacgaaccggaatgcggctgcacgttggcgtaatcggcgccgaacagctgcttggcgcgctcgatggccagggcctcgactttatccacatgctcgcagccgccgtagtagcgcttgcccgggtagccttcggcgtatttgttggtgaggccgctgccttgggcttccatcacgcgtttgctggtgtagttctccgacgcgatcagctcgatatgatcttcctggcgctgctcctcggcattcatggccgccagcagtgcgtcgtcatatccctggatctggtcttgtttgctgaacatcgcgtctctcccagcctttcgtattgttgaggcccgtgcagggccctttgatgcgatggtagggctggcgcagacaggtcaaatgcctacgcacgccacgcaaaggtgcgtttacgacatagcgggaacaacgcggaaaaaatgtgggagggggcttgcccccgattgcaaagtgtcagccaccgcatctgcaagctggcccaccgctatcgggggcaagccccctcccaccagggtttatacgatgatctggcggatgagtagcagcagcaggaaatgcaggggatagagggtgtaggcccagcgacgcatggcgggtggcgagatgtttttcccatgtcgcaataagaccaagcctgccaatggcgcaatcaggcacgcagccaaccccaacagcgccacaggcgtgccgctatcgagcaggatttgccattggttggcggcgacacagaccaaacctggcaatacgctgaaataccatgggcgactgaacaccaatagcatagccagcggcagcaagaccccaaacaaaccgaacatcaactgcgcggaaaacacggccgcaatcgtgacggcaattagcgccaatcctcgatcaaaaagcgccttctgctgccatcctcgggcaaccagcaaacccagcgccagggttggcaacacattcaacgtatcggcatcctcgattaacatccgatacggcacctcgctgatcacgctgaacagcaacaaccagcccaggtaactcccgctcaccggcgcgtttttcgcccggtgcaaattcgccgcaatcgccaggcaaaaccacggaaatgccaggcgccccggcacatacaggccatccaggcttaaaccgacatagcgcaggtggtccagcaccatactcaacagcgccagccacttgagcagatccaaggcgccatcgcggacacgtccgacaggcatcgttccagtaccgtgcataattccccagtgactttgcatttacagagcgtgcgcacccgcgacaatcttggttacagtgcgcaccaacatcgaccacaggaatgggccatgaccgacaagagccaacaattcgccagtgacaactattccggcatctgcccggaagcctgggccgccatggaacaagccaaccagggccatcagcgtgcctacggcgatgatgaatggacccaccgcgccgcagacggtttccgcaacttgttcgaaaccgactgcgaagtgttcttcgccttcaacggcaccgccgccaactcgctcgcgctgtcttcgctgtgccagagctaccatagcgtgatttgctcggaaaccgcccacgtcgaaaccgacgaatgcggcgcgccggagtttttctccaacggctccaaactgctcaccgcccgcaccgaaaacggcaagctgaccccggactcgatccgcgagatcgccctcaagcgccaggacatccactaccccaagccacgcgtggtcaccctgacccaagccacggaagtcggcagcgtgtacaccccggaagaaatccgcgccatcagcgtcacctgcaaagagctgggcctgaacctgcacatggacggcgcacgcttctccaacgcctgcgcgttcctcggctgctcgcccgccgacctgacctggaaagccggtgtggacgtgctgtgttttggcggaaccaagaacggcatggccgtgggtgaagcgatcctgttcttcaaccacaagctcgccgaggacttcgactaccgctgcaaacaggccgggcagttggcgtcgaaaatgcgctttctttcggccccgtgggtgggcctgctggaaaacgacgcctggctcaaacacgcacgccatgccaaccactgcgcgcaactgctgagcagcctggtggcggatattcccggtgtggagttgatgttcccggtgcaggccaacggcgtgttcctgcaactgtcggagccggctatcgcagcgctgacggccaagggctggcgtttctataccttcatcggcaaaggcggcgcgcgcttcatgtgtgcgtgggataccgaggaagagcgtgtaagagaactggcggcggatattcggaaagtgatggaagcctgatgccacgggcatttcagcccgatttcagagactgtttgtacgtatttctgacagtatctatctagcccctgccctggataagatctcgtcaccccgaacgcaacggacgcgttgtttcggggctgactgcctgccgaatagtcggctggaaatggaaatcccacagagggcaacatcatggaaattcaatgctacacgactgattctcagcttcgatccgaggccaacgccaccctcgtcggcctggacgacctgaggaaactggcgaatgttggtgacactatcatcgagccttcaaggctctttaccgtcaccggtaaagagttcgaaatgacagcatccggtgcgtacatcatcaacctgttcgtgcgttaaccactgactgtgggaggggggcttgcccccgatggcggtggggcattaaccaatgcgctgactgacacactgctatcgggggcaagccccctcccacatttagaccggcttcgttagtcagaactcgatacgcacatcacccttcggcacgctgcagcacgacaggatgtagccttcggcctcatcttcctcggtaatcccgccgttgtggtccatctcgacctcgccgcccagcttcagtaccttgcacgtcccgcagatacccatgccacaagcttttggaatcaacaggccaagcttggctgctgctgcgtgcacggtttcgcccggcgccacgcgaatgctcttgcccgacgcaatgaactccacctggtgcagatccgccaggtcgatttccggtgcgtcggcggcctgctcggcttgctccaccgcatccgcacgggcctccggcggcgtggcgccgaaggactcctcgtgataccgcgtcatgtcgaaacccgccacttccagcaggcgcttcaccgcgttcatatacggcgtaggcccgcagcagaacacttcgcgctcgaggaagtccggcaccatcagttcgagcatcttgtggttcaggtaaccgcgataaccggcccatggctcacccaacccgtgtttctcgcagatcaggtgcaggctgaagttgtcgatccgcgacgccatgtgctccagctcgcggtggtaaatgatgtctttgggcgagcgggcgctgtggataaacgtcatgtcgacgttggcgttggtgtcgtagaaccaacgggccatggacatcaccggcgtgatgccgacgccgccgctgaggtacaacactttcgggctaggaaagtcgatggcattgaacaggcccaccggtccgtgtaccgcgagctcctggccctcgtgcaacgtgtcatgcagccagttggaaaccttgccgcccggcacgcgcttgatggtcaccgagaagctgtacggcaccgacggcgagctggaaatggtgtaggagcgcatgatcggctggccttcgatctccaactccagggtgacgaactgccctggcttgaagaagaacaggatcggctggtcggccataaagcaaaaggtgcgcacgtcccaggtttcctggatgactttgacgcaccggacgatgtgccgaccattggcccaggtctgggtggttaccggattcaggaaattattggacatgttgttctccaccgccgacgtcggccttatggtggcgattctgcgtaacgccggaaccacccatttacctatctgcgacattcacatacttatcgcgaccagcccccaacgacctagggttgcgcgtcgggaacagattgggccatgtcgcccatggataaggttctgacgttgcgcggccccacactcgctcccaacaacgacgctttctttatgccttgcgtagtacaaccgtagccactattcgccggccacacagaatggccatgaggacacacacgatggacgtcaccgcaaccttaagcttgggcgatccgctggaacccgcacgcaaggccaccgcgcagatgctgcaagagcgcgagcgcactttctcgctgccgcagccgttctactctgatgagcggctgtttgatatcgacatgcaggagatcttccagaaagagtggttgatcgccggcatgacctgcgaaatccccaccaagggcaactacctgaccctgcaagtgggcaaaaacccgatcatcgtgatccgtggcgccgaaggcgtggtgcatgcgttccacaacgtttgccgccaccggggctcgcgcttgtgcaccagcgacaagggcaaggtcgccaaactcgtatgccactatcaccagtggacctacgaactggacggtcgcctgctgttcgccggcaccgagatgggcgccgacttcgacatgaagcagtacggcctcaagccagtgaatgtgaagaccgccggcggctacatcttcatcagcctggccgagaacccgccagccatcgatgacttcctgtcgacgctgaaccactacatggaaccctacgacatggagaacaccaaggtggcggtgcaaaccaccttgatggaaaaagccaactggaagctggtgctggaaaacaaccgcgagtgctaccactgcaacgcatcgcacccggaactgctgaaaaccctgctggaatgggacgacgtcaccgacccacgcgccgaccaggcgttcaaggaccatgtggccgcctccgccgccgcctgggatgccgagaagatcccttacgcccacgccagcttcggcctgcgtaaccgcatcgtgcgcatgccgctgctcaagggcaccgtatcgatgaccatggacggcaagcagggctgcgccaagctcatgggccgcatcaagaacccggacctgggctcgatgcgcatcctgcacctgcctcactcgtggaaccactgcatgggcgaccacatcatcgtgttcacggtgtggccgatcagcgcccaggaaaccatggtcaccaccaagtggctggtgcacaaggacgccgtggaaggcgtggactacgacgtagcgcgcatgcgcgaagtgtgggacgccaccaacgaccaggaccgtcgcctggccgaagagaaccagcgcggcatcaactccaccgcctaccagcctggcccgtattccaagacctatgagttcggcgtggtgaacttcgtggattggtacagcgagcgcatgctgaacaacctgggcgcagcaccggcaccgtacctcaaaggcgtgcctgtacagggataaaccgctttttgtagtgagcgggcttgtcccgcgttgggcggcgcagccgccctgaaaccagacaccgcgacctgcctggcagagcgcggtgtttttattggggcggctgcgccgcccagcgcggggcaagcccgctcactacaaataatctgcccatgccgcaagctgggtattttttgatcacttccttgtaagccaggtgttacctgggctgtgaagcagcaccaacatcttatccacagaaacgcgcacagactttgtgggcaactgtgctgcgcactgtggaaaactcgccgtgaccccaggtaattcgagaataggcacaatcgatcattttttgatcacaccgatcaaaccccttgtttacgggccttttatcggatagcaaacatgttatccacataaccaccaacagactttgggggcaacttttaatcctttgtggaaaacccaataaagaccatgaaaatcaaggcttccactgacattttcatgccaaatgcgcgattctggtcatattttaatcacccccaccaaagcctttatttataagggctagagccgacagcgaacatcttatccacagaagcgccaacagactttgggggcaactctgcatcggagaatcagcttgattggcgaaaaacctgaataaaaaccgtcagttagcctggttgtttttcgtacagagggctggagagcttgaaatacaaggggtgcggacagccgcgaacaggttatccacaagtggatcaacagggattgtgggtaagaaccctgtaggaggaggcaagcccccttctacagtctgggttcagcgcaccacgccttcttcgatgagtagctggagaatggcctctgcgcccgcctcagggctcaggcctttgagcacctgcccaccaccgccactggccttggccgttgcagccttcatacggtcagcgccgcttttggccttgatcaccttgaggcgcttgggccgtggcttggccggctgcaacaccgcagcattgaacaactcatcctcttcaatctggacgtcatgcgccgccaactcgccgcgctgcgccgggccgtaggcgctttgccgtggcttgggtgcagcgttatccacggtcgccaggaacggcaaacgcaccttcaagcgccgccgctgaccacggggcaaggcttgcagcacatgggccacgccgccctcaatggactccacctgcgccagcccgacgatcagcggccagcccagttgctcggccagcaggaacggcagcatgcccgagccttcaccggtttcggcctggctgccggcgagcaccacctgggcaccggcatcgcgcaggtactcgctgagcaccggcaacgcatcgctgcccgccggttgctccagcacatgcaattgcggcaggcccatgcccaggtagctgcgcaaggtcggttcggcgatgttgccggcgtgcagcacctgcaacttatcccccgccatttgcaggcccagttccacggcacgcgcatcctgctcggcacggcgcgggcgcccggaggtagggtgggcgccgatggacaccaggctgattacattcgtgttcatgaccatatccttaagctgcatcgcgcttggcgccattgcggtaggcctcgaccgctgcgatcaaggcatgcagtattgcggcgctttcgccgatcaccgacaggtcggcacgcttgatcatgtcgcagccagcgtcgaggttgatcgccaccaccttgtcgcaagcaccgatgccttgcaggtgctggatcgccccggaaatacccacggccacgtagacccgcgccgtgacccaggtgccgctggcgccgacctggcgatcgcgcgccatgaagccatcgtccaccgccacccgcgaggcgccttcggtggcgcccagggcggcggcggtctggtggaacagcgcccagtccttcacgccgttgccgccggagaaaatgaactctgcctcggccatcggaatcgccgccgggtccaccgccaccgcgccgaggtcttcgatgcgtggcaggctgcgtgccagggctgtggataactctacgggcagcacttcgtgacgggtctcgctgaccgggtcggcacattcggcagccgccaggatcaagcgcggcagtggccgagccaagtcttcctggccagcaccggcacggccgatgcactcgtcacccttgatctgccacacccgcgtggccgggcgctccttgaggctggcggcaaagcgccgacccaactcgccacccccgctgcggctgtccggcagcagccagtggcgcgggttgagctggttatccacagcccgcaggccctggacgcgttgctccggtgaataaccgtcgaatgcatggccttccagcaccagcaaacggtcggcacccgccgtggcaaacgcactttccttgtgttcaccaaacaccaccgccagcaccgcgccgtcgctgccggccagttgccgtgccaggccaagcaggtcgcggtcgtgactgctcaggcggccgccgaccatgtccggtaccacgttgatgtagaacgcgggggctgcaatctgatgcagcggcaattgcacttccaccgctgccgtacgtttggccgcaccgccctgctgggcgccactgcggtcgatgcgcttgatgccgttggggccgataaaaccgacgccatgcacattcttgcggatgacgccgttaggccccatccagctgtgctgcaccggttgcattgccgcatgcagcgggtgcaggcggttgcgggcgatccattcggcccgtgggtcgcggcggataatgtcgctcatcagtgcacctccgcaggttcacgcttgagtggggctttggccggtgcagcgccttccagcaatgcgtcggccaccagctcggcaatgtccttgatcaatgggcgcggctcgaccacgccttccagcatcgcggtgcattgcgggcaacccacggccaccagctcggcaccggtttcgcggatgtcttccatgcgcatatcggggatacgttgcttgccgggaatgtcagtgatcggcgcaccgccaccaccgccgcagcagcgtgaacggaagcccgagcgttgcatctccttgacctcgatgcccagagctcgcagcacttggcgcggcgcctcgtattcgccgttgtagcggcccagataacaagggtcgtgataggtcacgctgttacctttgtgctgccccaggttcaacgcgccctcaccgatcaactcggccatgaaggtgctgtggtgctgcaccacgtagttgccgttgaaggcgccgtactcgtttttcagcacatggaagctgtgcgggtcgcaggtgacgatgcgcttgaagctgtacttggccagggtctggatattgcgcgaagccagcagttggaaggtcgcttcatcgcccaggcgccgggcgacgtcgccgctgtcgcgttcttccaggccgagcacggcaaagtcgaccttggccgctttcagcactttgacgaaggcgcgcaaggtgcgttggttgcgcatgtcgaacgcgccatcaccgacccagaacagcacctcggcactacctttttcgctaagcaatggcaggttcaaatccgccgcccagttcaggcggccacccggcgcgaagccgccagggttgtcggtggcgatcaggttttccaggacttcggcgcccttgttcggcgtggcgcccttttccaaggtgaggtggcggcgcatgtcgacgatggcgtctacgtgctcgatcatcatcgggcactcttccacgcaggcacggcaggtggtgcacgaccacagggtctcggcgtccaccaggccgttgacgatcggctggtgcgggttgccgccgtgctcgcccacgggtttgcccggatacgggctgccggcgaacctggcatcggtgccgccagccaggccgaccaccatgtcctggatcagctttttcgggttcagcggctggccggcggcgaacgccgggcacgcggcttcgcacttgccgcactgcacgcaggcgtcgaaaccgagcagttggttccaggtgaaatccttgggtttctccacacccaggggcgcagtcttgtcactgaggtccagcggtttcaacccggtggaacgcccaccgccaaaacgctcggcgcggcggtgccaggccaggtgcagagcaccggcgaaggcgtgtttcatcgggccgccccaggtcatgccgaagaacatctcggacacgccccacagcacaccgacgctgagcaatgccgcgagcagccagccgccgaagtccgccggcaggatcccggccaccggcagcgttaccaggaagaaactcaccgagaacgccatcaggcttctcggcaggcgcatccacgggcctttcgacaggcgcgacggcgggttgcgccgacgcagatagacgaaggtggcgccgacaaacatcagcaccgaggccagcagcaaggcgtagccgaggatacggttgtgcaggccgaaaccgtggaccaggatcgccagcaaggccgacagcacgaagcccaacgcggtggcgacgtgggtattggcgatgtatttgtcacgggcgaccacgtggtgcaggtcaaccatgtagcgcttgggcatggccagcaggccgcccagcaggtcgaccttggacgcgcggccacggcgccacatgttcacccggcgcagggcgccgaggacggcgaggcccagggcggtaaacaagagaataggcagcaaggtgttcaacatggtgaagctcccacagaccgcacaggtctactgtgaaactggcgctgaatgtgggagggggcttgcccccgatagcagtgggtcagctacagctgtatcaactgacactccgccatcgggggcaagccccctcccacatttggagcgagtacacattggttcaaggctggctcagaaatctttgcagaggcgcagggcgtcgtagatcgcagcgtgggtattacgctgcgccacacagtcgccgatgcggaacagcaagtacccatcgcccgtctcgctaaggcacggctgcggcttgatcgcgaacaaggcttcgacgtcgatctggcctttgttgcgcgagccttccttgagcgcgtagtagatggcttcatccggacgcacgccgttctccaccaccacctgatcgaccacccgctcctctttggcgccggtgtattcgttctccagcaccgccaccagcttgtcgccctcgcggtagaccttttccagcatcatgtcgccggtcatgatcacttccttggggtacatgctgcggtagtaggtcgggaacgacgtaccgccgatggccacgcccggcttgatgtcgtcggtgacgatctcgacctggctgcctttgtccgccaggaaatccgccaccgacataccggtgaattcgcagatggtgtcgtacaccagcacgttcttgcccggcgccaccttgccgtcgagcacgtcccaactgctcaccaccaagccttcagcggcgccccagtgttcgttctgctccacattcgggtgcccgcccaccgccagcaccaccacatcggggcgcaggtccaggatggtgtcggcatccgccgccacgcccaggcgcaggtcgactttcaggcgcgccagttccaactggaaccagcgcgtaatgccggcgatctggtcacgctgcggcgctttcgaagcggtggtgatctgcccaccgataaattctttcttctccaacagagtcacatcatggccacgttcggcggccacgcgcgcagcttccatcccggcaggaccggcaccgaccaccacgaccttgcgtttgacgccggtggttttttcgatgatatgcggcacgcccatgtattcacgtgacgtcgcggcgttctggatacacagcacatccaggccctggtactggcggtcgatgcaataattggcaccgacgcactgcttgatctggtcgatctggcccatcttgatcttggcgatcaggtgcgggtcagcgatgtgggcgcgggtcatgccgaccatgtccacataaccgccttccaggatgcgcgtagcctggttcgggtccttgatgttctgcgcgtgcagtaccggaaccttgaccacttccttgataccggcggccaggtgcaaaaacggctccggtggataactcatgttcggaatcacgttggccagggtgttgtgggtatcgcaacccgagcccaccacgccgatgaaatcgagcatgccggtgtcgtcgtaatacttggcgatctgcttcatgtcctcgtgggacaaaccgtccgggtggaactcgtcaccgcacaggcgcatgcccacgcagaagtcgtcaccgacctcggcacgcacggccttcagcacttccaggccgaacttcatgcggccttcaaaggtgccgccccattcgtcggtccgcttgttgacccgtgggctccagaactggtcgatcatgtgctggtgcacggcggacagttccaccccgtccaggccaccggccttggcgcggcgtgcggcctgggcgtagttgccgatcacgcgccagatttcttccggttcgatggtcttgcaggtggcgcggtgcaccggctcacgcacgccggacggcgacatcagcgtcggccagttgaagccgtcccaacgcgagcgacggcccatgtgggtaatctggatcatgatcttggcgccatgcttgtgcatggcgtcggccaggttctggaagtgcgggatgatgcggtcggtggacagattgaccgaactccaccattcctgcgggctgtcgatagccacaacagaggaaccgccgcagatcgccaggccgataccgcccttggctttctcttcgtagtacttcacatagcggtcagtggtcatcccgccgtcggtggcatacacctcggcgtgggccgtactgagcacgcggttgcggatggtcagtttgccgatctggatcggctggaacattgcttcgaaagccatggcacggtcctcggcttacaacggcttgacggtgaacaggccgtcatcgtggccctcttcggagcctccgtagacttgttcggccacagtgcggatcttgctgccacgggcctcaagaatctggtccatggcaccggcaaaccagccggtgaacatgtagtcgaccttgcgcccgaccttgccgtacacgtagacgaacgccgagtgttcgagcttgacgctggcggtgcctttgtcgaggtcgatgtcctggatcttgaacaggccccagccgcgttgcgacaggcgcttcatgtagtgctcgaacaccgcgacgccttccaggccgtggcattcggcttctttctcgcaccagtgccaggcggacttgtagccggccttgtagaggatttcggcgtaagcctcggcgcccagcacttcttcgatgcccatgtggttgttgacgaagaaatggcgcggcacgtacagcatcggcagggcgtcggaagtccagacaccggtttcgctgtcgacttcgataggcaattgcggggcgatcttggccatggaaacttaactccagaaaattcttgtgtagtgccccggcgcggatggccggggaagaagatgcggtggcggtggcttactcgccccagacgtccttgaggacgttgacccagttctcgcccatgatcttgcgcaccacacgctcagggtggccgcgtttgagcagggtctcggtgaggttggggaactcgcccacggtgcggatgcccagcgggttgatgatcttgccgaagctggtcaggcggcgtgcatagcccttgtcatgggtcagcatttcgaagaaatcctggccatggccctgggtgaagtcggtgccgatgccgatggcgtcttcgccgacgatattcatggtgtattcgatggcttcggcgtaatcgtcgatggtcgaatcgatgcccttggccaggaacggcgcgaacatggtcacaccgacaaaaccaccgtggtcggcgatgaacttcagctcttcatcggacttgttgcgcgggtgttctttaaggccggacggcaggcagtgggagtaacacactggctttttcgattcgaggatgacttcttcggacgtcttggaacccacgtgggacaggtcacacatgatgccgacgcggttcatctcggcgacgatctcacgcccgaagcccgacaggccgccgtcgcgctcgtagcaaccggtgccgaccaggttctgggtgttgtagcacatctgcaccacaccgacgccgagctgcttgaagatttcgacgtagcccaactggtcttcaaacgcatgggcgttctggaagccgaagatgatgccggtcttgccctgttccttggccttgcggatgtccgcggtggtcttcaccggaatcaccaggtcgctgttctcacggatcagggtctggctggccacgatattgttgatggtggcctggaacccttcccacaccgacaccgtgcagttggcggcggtgagcccccctttgcgcatgtcctcgaacaggtcgcggttccacttggcaataatcagcccgtcgataacgatgctgtcggcgtgcaattcggctgggctcatcaggcgtccccttattggcgattcatgcgccgaatcgtctgccggcgctttggggccagcatatgcccaggggccgacagagccgggtgcaaaaacgacaggggaattgccgaaagcgtcaatccgcgacaaaggctgttaagagaggtctgactcgcggctgttctttgtcttacgcttgagccagaattcgggcattacctgatatgagacggcgcaatgaaatcgattttcctggctttggcactcatcgcaaccggcgtccacgcggctgaagacaccgacagcacgccgtgcgacggcatcgaaaacgacaagcaaaccctggaatgcgccacctataacaaaaccaccgccgaacaactgctcaaagacaactatcaaggcctgctcgaacgcatggcgtcgacctacggcagcgacaagaccaagctggcggacattaccgctcgtctgaaggatgcccagcagaagtgggaaaaactgcgtgatgctgattgtgccgtggacaccttcccggcggtgaccggcaccaaggcctatgcgattgcacagaatgactgcctggcacggatgagtgatgagcggtcggagtttttggagtcgattgggcaagagtgacggttaaaaggccttccatattgagttgaaggccatttgcagatgatcacgctgagtcttgtcgatattgaggtccgcgcaatgctggccccactgcgataaggcctccatcgtctgctcgatgtaaaggtcgggctcgagaaagctgaagggtgcgcagaccttcttgatcgcctggcgtgatggctggcctgcacctgcaaaagcacaggtgtgctcattcccgccaccgctggtagtggcaaacgtcaggtcataggctggcgccatctgccagccagccgaagagccgaagaaagagaagtttttcgcgtgatcgtcgcgattgtgtgccaacgcattgaagaccatcagccgggccattttctgcacatccccggcgttttgggtgatggcgaaggtcagacgcaacaggtcgccgtagtcaaggctgggcatgcggaaatcggcatacaggatcgccgcgctggtcagcatatgacgcttgatgtggccggtgcggtcaaagcgtcgagtgctgaagaaacgttctacgccggtatccgtctgcacctcgagcaagcttgaatccgagatctcgacccccgcgttacgagcgaccatggcgtaggcttgctcgatagcgccactgtcgcgaggctcgtcctggctgcggaatttgatcaaccagtgttcatagccttcaggcatatcgccaaatgaagagatggcctgcgtcttgtcggccgaaagcccaatcaccgcttttggtcgcgcaccaccgggagagccgcccgccaggcgcaatgactcgatcacctcatgcgtttccccagacaacacgttttgcgaagcctggtaaagggaggccaggtccaactcgcctggctctggatccttctcgaacatcggcctgtactccagcgcccccatgccccggttgcccatataggccagccggtccaatgggcggatcgtacgccgttcaatccccagttccatgcgaaaaaaccggtccatcagcaacagcccccagccatcgggcaacgaatcgctgaacgctcccggcaggccaccgaacagcaacgggtcggctgccaactgaggcgtagaagagaagtccatgtacagcggcgccaagttgaagccgttcgccagccaacccggatcatacgaaaaataaattcccctgccgggcgcatccaccagctcaccgacgtgtgaaccttgcaacatgacgtgcaatgcggagactgttttcatcgacgtcctcgaagcctggtttgacctttcaattcctgaagactgatcggcggcggcgcgctgaacagattcgccatttgtgcgcctacccccaggctcatcgcaatcagcagcaaggcatcaagggaaacctttccggtcgtttcaaagcgcttgagcgtggactcggcaacccccgactgggctgccagggctcggcgagaaaggttcttgctcagccgcagcgccttggcattccctgcgatctgcaaagcaatctcgccgggggcgtagagaatatgagtaagggccatggttcgacctcaagtgagtgttagcaagtgtagcaggcgctgaataaacctatcacataacggacaacgggttatccaaaaatagactttattgttaataacagacaatattttatctcttatatttttatgagtttcatctggcctgcgacacctttgacccttctcgaaaggtgcgcgaccatctgcgccatctcacatccttcaaggccagaccatgaaaacctgcggcatcgaaatcaaaggcagcgaagccatcatcgccgtcgcgtcactggacaaccagacgctggcccacgtcgccctggcgaccaagaaaattgccctggaagacgacgacgaggccgccaacgtcaaagccttcgccgcacaggtaaaggcatttgtgcaggaaaacgccatcgagcgtatcgcgatcaagaagcgcagcaagaaaggtgaattcgccggtggcccgaccacgttcaagattgaaggcgtgtttcagttgctggatggggttgaggtgacgttgctgtcgccgcagacccttaatgcgcagaataagaagcacaacttcgaactgccggcgacgctgaacaagtatcagcatgaggcttacaaggcggcgtgttcggcgctgctgaagaaataggccacatcattaatctactgtgggagggggcttgcccccgatagcggtgggtcagccaacgttgtatcaactgacagcctgtcatcgggggcaagccccctcccacatgtcagcgcttgttgcgcagccagtcgccaaaggttttgtcctccagggcataccctccccggctcgacttccacaccagctctttatcgcgaagggcatcgatacaggcctgaatcgtctgggtgcccggcaccacgtcgctgcccatgtcctccagcgccttgctgaccgccgttagggtgctgtcggtgaacggcgcgaagggttcgttgttttgcgagcgctccaccatcacttccagaacggcgcgctgggggatggtgaggttgttccaggcgctttcgaattcggtccacacaccggcacgcagcagttcggcacgactgtgcagcaactggccgaggttgctggcctcacccagctccagtgccacttcaccgatgatcgtgcgcaacatctcgggacgccggccgaccagttcaaaggcttcatcaatatcggcggcgttgaattggttggtcttggccaggtgcgcgttgaggtgcgcggtgtaggcctgggtgaactctttacccagcagcgggaacggcgtgatgctggagccgaagaacggctgacttttacccagtaccaagtgagccagcttgtcgcgattggagccggtgaacaccagatgcaaaccgctgccgtcctcgtcacgcccttggttgagctgatcccgggcagccttgagggcgaacatcgcattgatgcctgaatcgctggtcaaggcgtgctgggcctcgtcaatcaccagcacgaccggtttttccgcagcgcggtggagcaactccaaggcctgggtcaacgtcgcgccaagcggcaattgaggcttgctgaagtcccaggacagggtacgcagaaagctcagtttctcgattccaatgtgcttggccagcttgcgaatgcccttttcatagggcaccagcgcggcagcaatagcactggcaatcaactccgcgggatctttctctttgtctgcccacagatcgacatacacggtaagccaacctcgaagctgacactccgggatcagatcttcacgtaaaaaagtacttttgcccgtacgacgcggcgctgcgagaaacaggccagaggtgaaatcctggatgcctgcgcctaccagcccgtcggcaatgctgcaagccagggtggggcggcggaatacaaagccgctgtgcttggacatggttttatactcaattatggaaaggactataaattatagtcgcgagtataattgactataattgcccattacaccacctcccgtcgccgatcctccctcggacatttcgcaaaccgcgcccgataactgcgggtgaagtacgacggcgactcgaacccgcacgcaatactcacctccagcacgctcataccgctttggcgcaagagctgccgggctttttccaggcgcaggccaaggtagaagttgctcggggtgtcgttcaggtgcaggcggaacaggcgctccaactggcgccgggtgactttgatcgcctcggccagggccaaggtgctcagcggcggttcggtgtgctgttccatctcaccaatcacttgcaccaattttttgttgttgatgccgtagcgtgtggcgatctgcatgcgctggtggtctttgcgcgggcggatgcgcccgagcacgaattgttcggagacctggatcgccagctcggggccgtgggcctgggcgatcaggtcgagcatcaggtcgatggaagcggtgccgccagcgcaggtgatgcggcggcggtcgatttcgaacagttcctgggtgaccgtcaggtgcggataggattccttgaacgcgtcgatggcttcccagtgcaaggtgaggcggtggccgtcgagcagcccggcttcggcgaggacgcaggcgccggtgtcgatggcgccgagggtcacgccatcgtgatcgaggcgacgcagccagtgctccagcgcaggcgtggcgaactgcagcggctcgaagcccgccaccaccaataacgtcgcgccctttttcaacggttccagcgcagcgtcggcgttgaccgacatgccattgctcgccagcaccgcgccgccatcggcactcaatacatgccagcggtacagctcgccacgaaagcggttggccacccgcagcggctccagcgcagagataaagccgatggccgaaaagcccggcatcagcagaaagtagaaatcctgggacatggtggcgctctcgtaggacgggcagcgtgctcactgtgatacgccagttcaacgagccattcaagggcacaggtcgctgcagtgcaagagctggtcgccgccgtgcgttttgtcggccctcaagctgcgtaatttgatcccacggcgcacaaagacgccggcccccacaataacgacctgccgagggacccaccatgaaccgactgatcagccgctgcgtgctcgcactcagcgccagcgccatcttgagcacgaacgtactggctgccgacgcggcatcctgccagaacgtgcgcatgggcgtggtgaactggaccgacgtaatcgccaccagcgccatgacccaagtgttgctcgacggcctcggctacaagaccaaacagaccagcgcctcccagcaaatcatcttcgccggtatccgcgaccagcgcctggacctgttcctgggctactggaacccgctgatgacccagaccatcacgccgttcgtcgacgccaagcaagtcaaggtgctcgacaagcccagcctggaagacgcccgcgccaccctcgccgtgcccacctacctggcagacaagggcctgaaaaccttcgccgacatcgccaagttcgagaaagagctgggcggcaaaatctacggcatcgagccaggctcgggcgccaacacccagatcaaggcgatgatcgccaagaaccagttcggcctgggcaaattccagctggtcgagtccagtgaagccggcatgctcgccgccgtcgaccgcgccgtgcgccgcaaggaagccgtggtgttcttcggctgggcgccgcacccgatgaacgtcaacgtcgccatgacctacctcaccggcagcgacgacgccctggggccgaacgaaggcatggccaccgtgtggagcgtcactgcaccgaactacgccgagcagtgccccaacgtgcacaaactgctgaccaacctgaccttcaccgccgccgacgagagccggatgatgcagccgttgctggatcacaaggacgccatcgagtccgccaaacagtggctcaaggatcacccgcaagaccaggcccgctggctggaaggcgtgaccaccttcgacggcaagccggctgcggccaacctgcaactgaccagcaaataacctgattcgaatcaccgtgtcgcagccattcccggctgcgcacggcatcactacgcccgcctgtaaggaacctgcctcatgaaccacgacgtcatcatcacctgcgcactcaccggtgctggcgacacgaccagcaaaagcccacacgtgccggtcacccccaagcaaatcgccgccgctgcggtggaagccgccaaggccggcgcgaccgtggtgcattgccatgtgcgcgacccgcaaaccggcaagttcagccgcgacgtcgccctgtaccgcgaagtgatggagcgcatccgcgaggccgacatcgacatcatcgtcaacctcaccgccggcatgggcggcgacctggagatcggtggcggcgaaaacccgatggagttcggccccaacaccgacctggtcggcccgctgacccgcctggcccacgtcgaagcgctgctgccggaaatctgcaccctggactgcggcaccctgaacttcggcgatggcgacaccatttacgtgtccaccccggcgcaactgcgggcgggcgccaaacgcatccaggagctgggcgtaaaggccgagctggaaatcttcgacaccggtcacctgtggttcgccaagcagatgatcaaggaaggcctgctcgacaacccgctgttccaactgtgcctgggcatcccatggggcgcaccggccgacaccaccaccatgaaggccatggtcgacaacctgcccgccgacgccgtgtgggcaggcttcggcatcggccgcatgcaaatgccgatggcggcccaagcggtgctgctgggcggcaacgtgcgggtcggcttggaggacaacctgtggctggacaaaggtgtgcttgcgaccaacggccagcttgtggagcgggcgagtgaaatcctcagccgcctcggcgcacgggtcatgaccccggccgaaggacgcataaaaatgggcctcaccaaacgccgctaatcaaaaaatgtgggagggggcttgcccccgattacggtgcatcagtaccgaatgtatcgactgacacaccgctatcgggggcaagccccctcccacactgggccaccgaaatccataggaatgtgccatgagctttatcactgaaatcaaaaccttcgccgccctcggcagcggtgtcatcggcagcggctgggtgtcccgcgccctggcccatggcctggatgtggtcgcctgggacccggcgcccggtgccgaagccgcactgcgcaagcgcgtcgccaacgcctggggcgccctggagaaacaaggcctggcgccgggtgcctcgcaagagcgcctgcgcttcgtcgcgaccatcgaagcgtgtgtgaaagacgccgacttcatccaggaaagcgccccggagcgcctggagctgaagctcgacctgcacagcaagatcagcgcagcagccaagccgaatgcgttgatcggttcaagcacctcgggcctgttgccgagtgagttctacgaaggttcgacccacccggaacgctgtgtggtcggccatccgttcaacccggtttacctgttgccgctggtggaggtcgtcggcggcaagaacaccgcgccagaagccatccaggctgcgatcaaggtgtatgaatccctcggcatgcgcccgctgcatgtgcgcaaggaagtgcctggctttatcgccgaccgcctgctggaagcgctgtggcgtgaagcacttcacttggtcaatgacggcgtcgctaccaccggcgaaatcgacgatgcaattcgcttcggcgctggcctgcgctggtcgttcatgggcacgttcctcacctataccctggcgggtggcgatgccggcatgcggcacttcatggcgcagttcggcccggcattgcaattgccgtggacctacctgccggcgccggaactgaccgacaagctgatcgacgatgtggtcgacggcaccagcgatcagttgggcaagcacagcatttcggcgctggaacgctatcgtgatgattgcctgctggcggtgctggaagcggtgaaaaccaccaaggccaagcacggcatgaccttcgctgaataacggaaaccccgacatgcccgcactcaccacctacaccacccaggtccaccccgactgggtggactacaacggccacctgcgcgacgcgttctacctgctgatcttcagctacgccaccgacgcgctgatggacaccctcgggctggacagtgaaaaccgcgaagccagcggccattcgctgttcactctggagttgcacctgaactacctgcacgaagtgaaactcggcgccgacgtggaggtgcatacccagctgatcgcccatgacgccaagcgcctgcacctctatcacagcctgcacctggtgggggatgagaaggaactggcgggcaacgaacagatgctgttgcacgtggacctggccggcccgcacgccgcgccgttcaccgagaccacactggaaagactcactgccatcagcgccgagcaggctgacctgccgcgccctgccctgctcggccgagtgattggactgccacccaaaaaacgataaggagccaccatgcaaaccgccgccgctgttgccgatttccgtacctacccgaagatctgcgacctcgcgcaggtgcgggtgctggatgatcagattcgtgtgcaatgggccgatgggcggaccagcccgtttcatcatcagtggctgcgggacaactgcccgtgcaccgagtgcgtgtacagcgtcacccgcgagcaggtgctggagattgtcgatgtggacgagcacctcagtgctgtcgacgctcgcatcgagcaaggcttgctgagcgtgcaatggcgcggtggccaccgcagccagtacgatcccggctggctgcgggcgcatgcctacgacgatgagtcgcgtgccgaacgccaggcggcgaaacccaaatcccagctgtgggacaaccgcttccagctaccggttttcgactattcagcagtcatggaagacccgcacgcattgttgcagtggctgctggcgctacgcgattgcggcctcactcaaatccgcggcgtccccaccgagcccggcgccctggcgctggtcgccaagcgcatttcattcatccgcgagagcaacttcggcgtgctgttcaacgtgcaatccaaggccgatgccgacagcaatgcctacaccgccttcaacctgccgttgcacagtgacttgcccacgcgggagctgcaaccgggcctgcagtttttgcattgcctggtgaacgatgccgacggtggcgaaagtatttttgtcgatgggtttgccatcgcctgcgccctgcgtaccgaagaccccgaagcgttcctggcgctgtgcgacatcccggtggagtttcgcaacaaggaccgttacagcgactaccgccagttggcgccgatcattgcgctggatgccttgggcgatatagctgagatccgcatggccaactttctacgcgggccatttgagaccagtgaggaccagatgccgttgctgtatcacgcctatcgacgctttatcgccatgacccgggaagatcgctttcgtgtggtgcagcgcctgaacccaggcgagctgtggtgcttcgataaccgccgcaccttgcatgcgcgcaacgccttcgaccctgcttccggtgcgcggcacttccaggggtgctacatcgaccgggatgagttgctctcaagaatccgggtgttgcagcgataacattggactgattgcgctaggttacctagcgctcctcaactggcaaatttgcggcctcaagggcctctttcttttctacagcggctgcaatgagaggcgccatctcacgcagcatttctaaatcgccactcttctcataaaggctcagccatttgcgtcgaggcctcataatccgttcatcatccctgatggggagtttcttgagcgtattttccgcgcgctctcggaactcggctggaacagcatccgttaacaccaactgaagagatggcagactgatttcgaaccatccttcctgcacttcaaatgggtccaacaatccagcagccacttgcttgcttttagagctgttaatccatccgtcaatgtatcgatagttcgaccattcgtaagcaagcaatcgatcctcgttgtaactgacaccatgatcgacagtaccactggggatatacatcgcggcataaccacaccggtcataaaacccgtccgccagcgcatgcctgaagggtgaccacaagtctcttggtctctcggcagtcgggttttccttaagccaaacaccacccggttttcgacatttttcatcaaacttatctggctccgggataggattcgacacaggcgtcattattttttccctttcgttgctttttcaggtttgccctgagaaacgacccagcgtggccaaaagtcatcaagacctggtaaaacccgaaccaactcttgatgaatagctgacttcgtactcaacttttctggcagctgttccttatcaccacgcatccatgcctcggcggcttcgattgcgtcttctgcggcaactgaacgggcctgttgcaaaccaaaaacatccgagactagccagttcacgacatcgccttgcttggaccacacctctttagtgaccttggcttctccagcctcaaggtgaatgttgaaaacggcatctttctcttcaataaactcaggctcggccgaggccaataccagtggggagtgggtcgctacgatcagctgcactgcaactttttcttgcgtcatctcctctaccactttcaaaagagcaggcacgatccgacgctgccattgaggatgcaaatggcattcgacttcgtcgatcaggaaaataatttctttggcagggttaacttttcgctgcttgcaggcgcgcttatggccattccaagtccagacaatcatgtaggccagcgcagcaattcgacgcattcccgcagaggcatgaaccagtgggacgtcaaggccataggacatgcgcaatgttggatattcggtctcgtccagagggcctatatggcagggctcgcccggcgacaacttctcaatgcccgatggcgacaatgcatccaatgcgactgttaactctttgaaagaagggtctcccgccgttcgctgccaacgaacccagtcatgaattaaaccattacatatatttgttcccttttccgaaattgcccctttccatacctcatcgggagaaaagttaaacgctcgaattttctcttcagttccagcctgctgatccgtccaatagttacgcgcagggtcccaagcagaaaaactgccatccaccccagcataaataacaattcccgggatggatggtcgagccttaggctggcgccaaaaaccgtctttgaaatgaacctcaccttccttgtctccagccgtcaccttgctgaacgcaaaaccaatactagccgcattggaggattctctaggaatcgcctctgctccacgtgcccaagtgcgcgtcaaagcccaccaggcagcatccagcagaaagcttttgccgaggccattgtcacccgtgatgaagttgagacgaggcgcaaactcaaccggcccaaacttttcagcagggccgacacctttgagagacaggagctttagcattgcattaccttttgatttgcctgagagcgtgggctaggttggacgccaacaacgctggtaaagcccacccgtgtaagtaaacagcatataggcattccgggcatttgagctgcggcaatgctaatgccaaacaataacgactagctatcccctattcatcccacccttctagaaacggggcgcccaaaacaaaaaagccccgatcaagccgtgacaagatcggggcatagcgctttgtgtgagccttgcatcccgagggtgaccaaaccttcaaggtgcgtgctggtgttcagtgtgcccattactgctatcggtatatgacccgaaaacgacctgctcatagccatctgagccattcgtggattctgcccttgccgaccggtcggaggcctaccagaatcccaatcaagccccgttccctacaccaggataaacgtcatgatgcatgcggatttgattgaccaggatgacctgctgggccaactgcgctcgctgggtttcgaagtctccagcggcgccaccgccgagcaggcctgcgagtgcgcggtgcgtggtttgagcgaggcgcgggccaaggcgctcaagggcatggtggagcagatgtacaccggcagtgcaacgattctgccggccgtgcgccaggcgatcgataagcagctgttgccggcactggtgcagttcaagcagaactcccgcgcctgatcgattcctatcgggggcaagctccctcccacctttgactgtgttcacccatccaaatgtgggagggggcttgcccccgatacagacacctcggtctagagccgcacgctggcaaacgtcgactcgttgcgcgcctggctcaacgccgacatcggccccgacaacggtgacaacaccagcgcctgcggaatcggcatcatcgccacctgctgggtggtgttggagccgacgcgctcatctcttggcggaatgccgaagtattcgcggtagcacttggagaaatgcggcgtggacacaaacccgcacaccgacgccacttcgatgatcgacatcggcgtttgcttgagcagctgccgtgcacggatcaggcgcagcttgaggtagtaacgcgacggcgagcagtgcaggtacttctggaacaaccgctccaactggcgacgggagacggcgacgtacaccgccagctcatccaggtcgatcggctcttccaggttggcttccatcaacgccacgatttcctgcagcttcggctggttggtgccgagcatgtgcttgagcggcacgcgctggtggtcttgctcgttgcggatgcgctcgtacacaaacatctcggagatggcggccgacagttcgcgaccgtgatcgcggctgatcaggtgcagcatcatgtccagcggcgcggtgccgccggagctggtgaagcggttacggtcgagggtgaacaggcgagtgctcatggccacgcgggggaaggcttcctgcatagaggccaggcattcccagtgcacgctgcaatcaaaaccgtcgagcagaccggcacaggccagggcccaactgccggtgcataccgcgcccaagcggcgcgattggcgtgcctggctttgcagccacgacacgtgttcacgagtcacggtacgctggatacctacgccaccgcacacgatcacggtgtccagggccggggctttgtgcatggaagcatcgggagtgatttgcagaccgtcgctggcccacacctggtttccgtcgacgctcaaggtcgtccagcgatacagctcgcggccggagagctggttggccatgcgcagcggttcgactgcggaggccagggaaatcagcgtgaaattgtccagcagcaaaaagccgatggattgaggcgcacggttctggggttgggccccggagttgaacgacgtcatcgcggtatctcctcacacaaagcgggtgatggcctcaggcgaggctcttgttattgcgctcttcatccggcgaggagagaggctttgaattgatagagcaaatgccatgcctaaatttgaatggccgtccaataactcctaaaaacgacctcatgacgcgtctaaacaagcccgcgcagcaagtatggttatggctggaattggccgtaggaacatgcccggacaaggtgtgtgagcagatcggtagcacttgtgggaaggcgctttgcgggcgtgggagaagtctgtcacccaacgcgcgggagaccggtggtcaggtcggaaatcgttcgcaagctacttatctatttgcgacgcgctaaaaggtggcgcttttggttggggtgttcactttttgcgcagcggcgcctggatgattgctatcgggggcgagccccctcccacctttgactgtgttcaccaatccaaatgtgggagggggcttgcccccgatgcaggcaacgcggtctcagcactccacggcgctgaccgccaacccaccacgcgaggtctctttgtacttgtcatgcatgtccgccccggtatcgcgcatagtgcggatcacccggtccagggagataaagtgctggccgtcgccgcgcagcgccatttgcgccgcgttgatcgctttcaccgccgcgattgcgttgcgctcgatgcacggcacttgcaccagcccgcccaccgggtcgcaggtcaggcccaggttgtgttccaggccgatctcggcggcgttgcacagttgttccggcgtggcgccgaggatctcggccagcccggcggcggccatggcgcaggcagaaccgacttcaccctggcagccgacttcggcgccggagatcgaggcgttcttcttgcacagaatgcccaccgccgccgcaccgagcaggtagtcgaccacattggcttcggtgacttcctcgctgaacttcatgaagtagtgcagcaccgccgggatgatcccagccgcgccgttggtgggtgcggtgaccatgcgtccaccggcggcgttttcttcgttcaccgccagggcgaacaggttgacccattccatggcactcagggtcgaaccgatcacattcggcttgttcaactcctgcaggctgcggtgcagcttggcggcacgccgacgcacgttgaggccaccgggcaggatgccttcgtgcttgaggccttgctcaacgcaatcctgcatggcacgccagagcttcataaggccgctgcggatttcatcttcagaacgccagaccttctcgttggccatcatcaactcggccacgcgcaggttgtgggtcttgcacagctgcaacagctccaccgcgctggaaaaatcgtaaggcaactcggtgcggtccatgtcggccacgccgctttgcgcctgggcttcatccactacgaaaccgccgcccaccgagtagtaagtgtcgcggtgcagctcgccgttgtcacccgacaccaccagggtcatggcgttgggatggaacggcaggttttcgtcgagcaggcgcatgtccctggcccagacaaagggcaccggcaagcgcccatcgagcagcaaggtgtcggtctcgcgcagggtgtgaatgcgcaggccgatttgcgacggatcgatagcgtcaggccattcgcccatcaggcccatgatggtcgctgtatcgctgccgtggccgatgccggtggccgacagcgagccatacagctgaacttcgacgcgccgcacctgttccaacacttcacgttcacgcaagccttgaacgaacaacgccgcggcgcgcatggggccgacggtgtgagaactcgaaggcccgatgccgatcttgaacaggtcgaaaacactgatagccattgccgtagaactcctcgataagcacgggccaggcttgaacgagctgctacgctcagatcgcccagatggcggcatcatcaagcttttgtttgccgtcacggcgtctcacaccgacgcacccatgctcaccagcgtcgcgtctgtgcgatcaccggttttggccgtttttagcggtgcagatgggcaaaaactgcagttttgccttgggaaaaacctgtaagcgacgtcaccgacactggatacgaccctccctgtactggatacgacgccccctgtaggcgtcagattttcactggtacatgatcagtctcgactcgtttgcaaggcaccgtgccagagctgttgtcgcacgctccaaccgcaacacttataaagcgcggcgaacgccgccagaaaaaacacaggagtctagccccatgaaagcttcaccctcgttgttgttggccgccatgctgagtctgccagtcctggcgcacgctgcagaaccggcacaatgtcagaccgtcaacttctccgatgtcggctggaccgacatcaccgtcaccaccgcgaccaccagcgaaatcctcaagggcctgggctacaagccgcgcaccacgatgatttcggtgccggtgacctacaagtccctggccgacggcaagaacatggacatcttcctcggcaactggatgccgaccatggaaaacgacatcaagccgtaccgtgatgccggcaccgtggagaccgtgcgtgccaacctggagaacgccaagtacaccctggcggtcccggaagcgctgtacaacaaaggcctgaaggacttcgccgatatcgccaaattcaaggatgaactgggcggcaagatctacggcatcgagccgggcaacgacggcaaccgcaccatccagacgctgatcgacaaagacgccttcggcctgaaaaccgccggcttcaaagtcgtcgagtccagcgaagccggcatgctctcccaggtcgaacgcgccaccaagcgcgaccaggccatcgtgttcctcggttgggaaccgcacccgatgaacacccgcttcaagatgaagtacctgaccgggggtgatgattccttcggccccaactacggccaggccaccatctacaccaacacccgcaagggctacacccaggaatgcagcaacgtgggccagttgctgaagaacctggtgttcaccctgaacatggaaagcaccctgatgggtaatgtcctggacgacaagatgaaacccgacgccgcggcgaaagcttggctgaagaagaacccgcaagtactcgacacttggctcgccggcgtcaccaccgttgatggcaaacctggcctggacgccgtgaaagcttacctctccaagtaatgccgctgaccccggggcggtgcgctgccccgggatgttttccctcttcgcatgtggacattcactaccatgctgactgaacagaaaatcccactaggccagtacatcgctgccttcgtcgaatggttgacccaacacggcgccaactacttcgacgcaatcgcatcgaccctggaaacgatgatccacggcgtgacgtttgcgctgacctggttcaatccgctggcattgatcggtctgattgcgctgctggctcactttattcaacgtaaatgggggctgactgtgtttgtcatcgcctccttcctgctgatcctcaacctgggttactggcaggaaaccatggagaccctggcgcaagtgctgttcgccaccctggtctgcgtggtcatcggtgtgccgctgggcattgttgccgcgcacaaaccgttgttctacaccatgatgcggccggtgctcgatctgatgcagaccgtaccgaccttcgtctacctcatccctaccctgaccctcttcgggctgggtgtggtgcctgggctgatttccacggtggtgttcgcgattgccgcgccgatccgcctgacctacctgggtatccgtgatgtaccgcaagagttgatggacgccggcaaggcctttggctgctcgcgccgtcagctgctctcgcgcatcgaactgccccacgccatgccgagcattgccgccggcattacccaatgcatcatgctgtcgctgtcgatggtggtgatcgcggccctggtgggcgccgacggcctcggcaaaccggtggtcaacgcactcaacaccgccgacatcgccctgggctttgaagccggcctggcaattgtcttgctggccatcatgctcgaccgcatctgcaaacaacccgacgctaaagtagggggtgatgcatgagcattatccgattcgacaaagtcgacgtgatcttctccaaagacccacgcgaagcgctcaagctgctggaccagggcatgagccgtaacgagatcctgaaaaagaccgggcagattgtcggcgtggaaaaagccagcctggatatcgagaaaggcgaaatctgcgtgctgatgggcctgtcgggttccggcaaatcgagcctgttgcgctgcatcaacggcctcaacaccgtgagccgtggccagctgttcgtggagcatgaaggtcgccagatcgacatcgcatcctgcacccccgccgagctgaaaatgatgcgcaccaagcgcatcgccatggtgttccagaagttcgccctgatgccttggctgacggtgcgcgaaaacatcagcttcggcctggagatgcagggccgcccggagaaagaccgccgcaaactggtggatgagaaactcgagctggtgggtctgacccagtggcgcaacaagaagccggacgaactctccggcggcatgcagcagcgcgtcggcctggcccgagcgctggcgatggacgccgatatcctgctgatggacgaacccttctccgccctcgacccactgatccgccagggcctgcaggacgagttgctggaactgcaacgcaagctgagcaagaccatcgtgttcgtgagccacgacctcgatgaagcgctcaagctgggcagccgtatcgcgatcatgaaagacggcaagatcatccagtacagcgtgccggaagagatcgtgctgaacccggcggacgactatgtgcgtaccttcgtagcccacaccaacccgctgaacgtgctgtgcggccgcagcctgatgcgcaccctggacaactgcaagcgcgtcaacggttcggtatgcctggacccgggcggcgactcgtggctggacctggccgaaggcaacaccatcaagggcgctcgccagaatggcgcggtgatgaacctgcagaactgggcaccggggcaagcggtggaaggcctgggccggctaccgacactggtggactcgaacatcggcatgcgcgacgctttgcagattcgttatcacaccgggaacaagctggtgttgcatgacaacaatcaggtggtggggattctcggagacagtgagctgtaccacgccctgctcggcaagaacctgggctaacactgcacatatcactgtagaaacggggtcaatgtgggagggggcttgcccccgatagcagtggatcagtaataaatatactgactgacatactgcaatcgggggcaagccccctcccacatttaaagcactaccaggcttcagctatagacccggccaaggagttgccgatggctttcaaactgatcgagcacgtcccgggtgatctgttcctgggcgaagcccatcaggtcgtattcctgaggcccgttgtgcaggtacacctcggcacggtagtagcgagtgcgctcttcctcgggcaggtcactcggcgccgacgagtaggcatccaggctcacttcatagacaaacgggttgccctcttccatctcgatgcgtacaccgatgcagcgcttggacttgccgagcaaggtctgcacttccaagccctgatcacgcaacgccgtcgccgcctcttccaacgccggcgtcacatgcttgtccatgaaacgctgcacggtgccttggctcggttgcaggtccagcgccgtcagacgctcgctgaaaccacggcgaccacgctcggccaattgcgcctgctcctgttcgatggccacgtcctggcgcatcgccttgtgcaagccgaacataaagaagatcagcaccaccgagaacggcagccccgccagcaccaccatggtttgcatggcttcgaagttgccggcgaacagcaggccgatggtcaccagggtgatcaccgccgaccagaagatccgcagccagtgcggcgcatcttcgtcaacattgccgcctttgcacgacaggttggccatcatcaccgcaccggaatccgccggggtcaggaacagcacgaagccgacgaagatcgatacgccgatgacgattttcgacgccgggtaatgctccagcagttgatagatggccatcgacggctgttccagtgcggtcttgcccaactccaccgcaccgtggttcagcaccaggtccagcgccgagttaccgaagatcgacaaccacgccagggtaaagcccaacgggatcagcagcacgccggccaccagttcgcgcaccgtgcgaccacgggaaatccgcgcaatgaacatgcccacgaatggcgcccaggaaatccaccacgcccagtagaacagggtccacaggcccatccaacgttcggtcttgtcggcgtcgccttcgtacacgtacaggtcgaaggttttcaggatgatgccgttgaggtagtccccggtgttctgcaccaggccgttgagcaaatgcagggtcgggccgaacaacagcacgaaaatcaacaggccgctgaacagcacgatgttgaggttggacagacgacgaatgccgttctccacgcccgacacggcggcgatggtcgccacggtgctcatcacgatgatcacgatcaacaggttggtgttgctgtgctgcatgccgaacaggttttccaacccggacgacacctgcatcgaaccgatccccaggttcgtcaccaggcccagcagggtcacgaacatgccgaaaccgtctaccgcatggccggccgcgcctttcacccaacgctcgcccaccagcgggtacagcgccgaacgcagggccagcggctggttatgccgatacgcgaagtacgccacggccaggccgaccagggcatagatcgcccagccgtgcaggccccaatgcaggaaggtcagttgcagcgcctggcgggcggcgccattgctggcggctgcgccttcgggcgggttgaagtaatggtccagcggctcggaagcaccgaagtacagcagcgagatgccgatacccgacgagaacagcatgccggcccaggcgccgtagctgaagtccggggtgtcgtccttgctgcccagtttcaacttgccgtaggacgaaaacgccaggcccaccacaaacaccaggtaggcggcgatgaccaccatgtagtaccagccgaagcttttcgatagccacgcctgggcaacaccgagcatgcgcccggcctcctgcggggcgatgatcagaatggcggtcaacaacagaatcagcgcggtggaggtgtagaacacccaaccgttgacccgcaccttttccggtggggtttttataagagaggcagaactcatggcgcagatgctccgggcagtgcgagagagaaacacaaggcaacggttatcccgggacatcgatttttcggcagtcgacggacgggtgttataaagacaccccgaaaattcttgaaccccgccgaagcggtgtacaagccctgatacggcctgtttcaaggatttttgcaggtgtcagatgtcgcggctcccaggtaggaaatatctgtaggcagcgaccatttgtcgcagatcttattctttgttgattgaacgttcaatcaaaacaaaatagactggccatcaagccgacggacgtttatcgcccgccgcaggcctaaggagaggtgctacatgcccaaggtcggtatgcaacccatacgccgccagcaattgatcgaagccacgttgacggccatcgatcaggtcggaatgggagatgccagcattgcgctgatcgcccgtttggccggcgtctcgaacggcatcatcagtcactacttcaaggacaagaacggccttattgcagcgacgatgcgctacttgatgaacgcgctgatcgacaacgtccacgaacgccgacaggcgctcacggacgacagcccacgggcgcacctgcaggtgatcatcgagggcaacttcgacgccagccaggtcaacggaccggcaatgaaaacctggctggccttctgggccaccagcatgcaccacccgtcattgcacaggttgcagcggatcaacgatcaacgtctgtattccaacctgtgctgccagttccgccgagtgctgccgctgccgcacgcacgcaaagcagcccgcggcctggcggccctgatcgacggtttgtggttgcgcggcgccctgtcgggagacgctttcgacacggcgcaggcgcaacggatcgcttacgaatacatggatttccaattggccaagcaggtgagttagagcacacataaaccgctcaacccctgaacgtctgccgctcagtgttgccacaccttcatggcccaccgacggcgggtaacgccaaccacttatgcacttgcgaggactttatggcccgtttcgacctgcaaaaactctacattgacggcggctacagcgacgctggcagcgatgccaccttcgaagccatcaacccggctaacggtgaagttctcgcccaagtgcaacgcgcaacgaaagaagacgttgaacgtgccgtggtcagcgccgaaaaaggccagaaaatctgggccgcgatgaccgccatggagcgttcgcgcatcctgcgtcgtgccgtcgacatcctgcgcgaacgcaacgacgagctggccgccctggaaaccctggacaccggtaaagccttctccgaaaccaagtacgtcgacatcgtcaccggcgccgacgtgctggaatactacgcaggcctggtgccggccatcgaaggcgagcagatcccgctgcgcgacacctcgttcgtctacacccgccgcgagccgctgggcgtggtcgccggtatcggcgcgtggaactacccgatccagatcgccctgtggaaatccgcaccggccctggccgccggtaacgcaatgatcttcaagccaagcgaagtcacctcgctgaccaccctgaaactggccgagatctacaccgaagccggcgttccagcgggcgtgttcaacgtgctgaccggcagcggtcgtgaagtcggcacctggctgaccgagcacccacgcatcgagaaagtctcgttcaccggcggcaccgacaccggcaagaaggtcatggccagcgcttcgagctcctcgctcaaggaagtgaccatggaactgggcggcaagtcgccgctgatcgtgttcgaagacgccgacctggatcgtgccgccgacatcgcgatgatggccaacttctacagctccggccaggtctgcaccaacggcactcgcgtgttcgtacccaagcacctgcaagccgtgttcgaagccaagatcgtcgagcgtgtggcgcgcatccgcgttggcaacccgcaggacgacaccaccaacttcggcccgctggtcagcttcgcccacatggaaagcgtgctgggctacatcgccaaaggtaaggaagaaggcgcacgcgtactgtgcggcggcgaccgcctgaccgacggcgacttcgccaaaggcgcctttgttgccccaaccgtgttcaccgactgcaccgacgagatgaccatcgtccgtgaagaaatcttcggcccagtgatgagcatcctcacttacgagaccgaagaagaagtgatccgtcgcgccaacgacaccgacttcggcctggccgccggcctggtgaccaaggacctgaaccgcgcccaccgcgtgattcaccaattggaagcgggtatctgctggatcaacgcctggggcgaatccgacgcgaagatgccggtcggtggctacaagcaatcgggtgttggccgtgagaacggcatcagctcgctgaacaacttcacccgcatcaaatcggtacaggttgagctgggcgactacgcctcggtgttctaagagccgggatttgtattgcctgtgaggccgccatcgggggcaagccccctcccacactttgatttgcgaatacattcaaaaatgtgggagggggcttgcccccgatgaggcccgacctgaccacacatcaaagagggtgcatccaatgtcccaagaatacgattacatcattgtgggtgccggctccgccggtaacaccctggcgacccgtctgaccgaagacgaaggcgtcaccgtcctgctgctggaagccggcggcccggactaccgtttcgacttccgtacccagatgccagccgccctggcgttcccgctgcaaggccgccgctacaactgggcctacgagaccgatccagagccgcacatggacggccgccgcatggaatgcggtcgcggcaagggcctgggcggttcctcgctgatcaacggcatgtgctacatccgcggcaacgccatggactacgacaattggtcgaagctgccaggcctggaagactggacctacctcgactgcctgccgtatttccgcaaggccgaaacccgcgacatcggccccaacgactggcacggcggcgatggcccggtcagcgtgaccacgcctaaagccggcaacaacccgctgttccacgccatggtcgaagccggcgtgcaggccggttacccgcgtaccgaagacttgaacggctaccagcaggaaggcttcggcccgatggaccgtaccgtcacgccgaacggccgtcgcgccagtaccgcacgcggttacctggacaccgccaagaagcgttcgaccctgaccatcgtcacccatgccctcaccgacaaagtgttgtttgaaggcaagcgtgccgttggcgtgcgttacctgatcggtgccgccgaagagcgtgttgaagcccgcgcccgtaaggaagtgctggtgtgcagcggcgcaattgcttcgccgcaactgctgcaacgctccggtgtcggcccggccaaactgctggaaagcctcgacatcccggtggtccacgacctgccgggcgtcggcgaaaacctgcaggaccaccttgagctgtacctgcaatacgcctgcacccaaccggtgtcgctgtacccgtcgctgctctggtacaaccaaccggccattggtgccgagtggctgttcaacggcaccggcatcggcgccagcaaccagttcgaagcgggcgggtttatccgcacccgtgaagagttcgaatggccgaacatccagtaccacttcctgccggtcgcgattaactacaacggcagcaacggcgtaaaagagcacggcttccaggcacacatgggctccatgcgctcgccaagccgtggccgcgtccagctgaagtcgaagaacccacgggactacccgagcatcctcttcaactacatggccaccgagcaggactggcaggaattccgcgacggcatccgcctgacccgtgaaatcatgcagcagccggcgctggacccctatcgtggccgcgaaatcagcccgggtatcgatgtgcaaaccgatgagcaactggacaagttcatccgtgagcacgccgaaaccgcgttccacccgtcctgctcgtgcaagatgggcaccgacgaaatggcagtagtcgatggcgaaggccgcgtgcatggcatgcagggtctgcgtgtagtcgatgcgtcgatcatgccgatcatcaccaccggcaacctgaacgcgccgacgatcatgatcgccgagaaaatcgccgacaagatccgtggccgccagccattgccgcgcagcaccgccgactactacgtggcaggcgacgcgccggtgcggggcaagccgctgcgtgaagtgggccctaccgcgcagtaacggatacaccgcggtgttcccatcggaggcaagccccctcccacatttttgaccgtgtgaacccgatcaagtgtgggagggggcttgcccccgaagaggcccgaccagtcactgcaaaacccctccttgatcagctactctgtctgcctgcccgcgacgagccgcccacaaggaaggccccatgttcgatcaccacgccacactcaaacagcatttcagtgccctgcgcacccgtgccgaattcttttcgctgcgttatgtacgcgaatccggccaatacctggccgtacgcaagaacgtcgccgaaccgccgcacctgagccacgacgagggcgccatgctcaccgtgcgtctcaacggcgtggaagcctacgccgcgaccaacgatatttccctggccggcctgcaagccgcccttgagcgtgccgaacagcaagcccggcaaatcttgccccacgccctgctcgacctgcgcgagcaacacgtctccagtgacgtcgccgattacctgtcgcccaaccttcaacagcccttcccatccctgagcgattgctaccagttactcggcagcgaatcggcctccgtgccgaaggacgagcgcctggtgagctgggaagtcagcctgggcctgacccacgtcgagcagatctacctgaacaatgccggtgccgagttgcgccaggcccagcgctttgtgttccccggcgtcaacgtcaccgcctacgatggcaatgacagccagacccgcaccctcggcggcagcaacttcggccagcaaggcgggttcgacgtaatcagccgcttcggcctggtcggtgccgcgccacgcatcgccgacgaggccctgcaactgctggccgcgccgaacacgcccagcggcccgcgtgacctgctgctgatgcccgatcagatgatcctgcagatccacgagtccatcggccacccgctggagttggaccgcatcctcggcgacgagcgcaattacgccggcaccagttttgtgaaggccagcgacttcggccacctgcaatatggctccccgctgctgaacgtgaccttcgacccggacattcccgagcagctcgccagctacggccacgacgacgaaggcaccaaagccagcaaacagttcctgatccgtgaggggctgctgctcaaaccgctcggtggcgcgctgtcgcaattccgtgcgggcatgcaaggcgtggccaacagccgggccagcagctggaaccgcgcgcccatcgatcgcatggccaacttgaatatcgaagcgggcgacaagagcctcgcgcaactgatcggcggtatcgaaaacggcatcctgatgtcgactaaccgctcgtggtccatcgacgatgcgcgcaataaattccagttcggctgcgaatggggccaactgatcgaaaatggcgagttgaaaggcgtggtgaaaaaccccaactaccgggccatttccgcgaacttctggcgcaacctcagcgcggtcggcgatgccagtacgttcaaggtgctgggcacgccgaactgcggcaaaggtgaacccaaccaggtgattcgcgtcggccatgcctcgccggcctgcgtattcagcgatgtcgacgtatttgggggagatgcctgatgaacaacttcaaggcactggtggagtggctcaaacaggccatcaccgacaacgaacaattccacctgggctatgcggatgaagcgtccgagttcgtgcgcttcaaccacgccaaggtgcgccaggccggccaggtgcaacaagccagcctcagcctgaaactgatcaacaatggccgccatgccgacctgggcatcaccttgtccggcgcagcggaactggaccgccaacgtttggccgacggcctgcaacaactgcgcgacaccttgccgttgctacccaaggacccgtacctgctgctgaaccacaacgcctggcaaagcaacaacgaacaaacgcgaccgctgccggacctggcccgggtgttggaagacatcagccaggcggctgagggcgttgatttggtcgggttctacgcttccggcccgatcagccgtggctttgccagctcggacggcgcgttcggctggcaccgcgccaacagcttcaacttcgatttcagcctgttccacgccaatggcgaagcggtcaaggccagctacgccgggcacacctgggacagcgccgagttcgccgcgcgcttccagcaagcccgcgagcaattggaattcctcggccgcccgctgcataagctggcacccgggcagtaccgcgcctacctcgccccggcggcgctggaagaaatcatcagtctcatcacctggggtggtttttccgcccaggccatcgccagcaaaggcagctcgctgcaaaagctgtatgccggtgaacaatccctgagcccgctggtgaccgtcgacgaacagatcagcggctccctgagccaggcgttctccaccgaaggctacccgcgcggcgacgtcacgttgatcaacgcgggcaaaggcgcaggccagttgatcaactcgcgcagcgccgccgaatatggcctgagcaccaacggcgccagcagcgacgagtcccccagcgccttgcagatggccgccggcgacctggcccaggccgatatcctcaagcaattgggcaccgggttgtacatcagcaacctgtggtatttgaactactccgacctgccggcggcgcgcctgaccggcatgacacgcttcgccacgttctgggtggaagacggcgaaatcaaggcaccggtcagcaccatgcgctttgatgacagcgtgtacaacctgctgggtacgcagttggaagccctgaccgctgagcgggaactgctgctctcggccagcacgtacagccagcgcaacacggcctccaacctgttgccgggtgccttggtcaaacgcctgaccctcaccctctaaacacagcagttcccctgtgggagggggcttgctcccgatagcggtgtatcagccaagtattcatcagctgacacgctgcaatcgggggcaagccccctcccacattgagttgtgctgagttcagacatctctgtttcgccccttcctacggttaattcttgtcttccccacctgcacgggcagcctgttgtcgcctgcaaaaaacctcgttataagggttagtggcaccccgccaccccacccacgagagcatgaccttgcccgggaagggcaagctggagcgttgacatgaaccatggaagttttgtcatagaaaagctgttcaagcactacaacgttcatgttgagcagctaggaaacgattcggaaaaaaagaccgtcctgatggtcaacggcgcgctgtccaccacgcgctccttcgcccgcaccagcaaatgcctggccgagcatttcaatgtgctgctgttcgacttgccgttctccggttattcccgcgaacacaataccgacctggacctggtcaccaaggatgacgaggtgcatatgctgcgcgccttggtcgagcgcttccaggtcaaccacctggtgtcagcctcctggggtggcatctcaaccctgctgaccctggcccacaacccgccgtccatcgaaagctcggtggtgatggccctggcgcccaacctcaaccaggccatgctcgactatgtggagcgcgtgcgcgtgttgatcgaagcggacgacaagtcggccgttggccacctgcttaacgagaccgtgggcaaatacctctcgccccggctcaagcgcaacaatcaccggcacctgtcgagcatggccaccaccgaataccgccaggcgcgttttcatatccaccaggtgctgggcttgggcgacggcaattacctgccagcactcaagcagattgaaacaccggtgcacttcctcaacggcgcgctcgacgaatacacccccgccgccgaggcgcaattgttcaagcagtacgtggggcgcagcagctttgccgtggccgaacacaccggccacttgcttgacctcgaatccaacgaagcggccaccgcggtacaccgtgaactgctggatttcctggtgggaaaaagcaccccggttggcgcataatcgccgacacatagccagctaacaaaaaggttctctatgcccaatcgcgtcccgctcgatgccaagaccgcccgctggctcccctgggtggtcgcgattgccttcttcatgcagtcgctggacgggacgatcctcaacacggcattgccggccatggcccgggacctcgcggaaaacccgctgcgcatgcaaggggtggtgatcgcctacatgctcaccgtcgccttgctcatcccggcctcaggctggattgccgaccgcttcggcaccaagaaaatcttctttggcgccatcatgctgttcagcattggttcgctgctatgcgccttgtccagcagcctgaccatgctggtcggtgcccgggtaatccagggcctgggcggtgcactgatgctgccggtcgggcgcttggtggtgctgcgcgcatatccgcgttccgaactggtgcgcatcatgggcttcattaccatccccggcctgctcggcccgctgctcggcccgaccatgggtggctggatggtgcaatacctgacctggcactggatcttcctgatcaacctgccggtgggcatggtcggctgttacgccgtgtggaagctgatccccgacctgcgcggcagcgaacgcacacgctttgatggcgtggggtttctattgtttggcgcggcgatggtgttgatcaccatcgccatggaaggcctgggcgaactgcacctgccgcacctgcgggtgatgttgctgctgttcggcgggctggcgtgcctggcggcgtactggctgcgcgccgggcatatcgacaacccgctgttttcaccggtgctgttcaagacccgcacctttgccgtgggtatcctcggcaacctgtttgcacgcttgggcagtggcgcgttgccgttcctggtgccgttgctgttgcaggtcgcgctgggctactcgccgtccgaagcgggtatgagcatgctgcccctggcggcggcggcgatgtttgccaagtcagtcgcgcgtacgctgatcgaacgcctgggctaccgcatcgtgctcaccggcaacaccctggcgctgggcatcatgctggcgagcatgggcctggtcagcgagcacacgccctacccgctgctgttgtgcatgctggcggtactgggggcgatcaattccctgcaatttaccgcgatgaacaccgtcaccctgatcgacctcgacgacgcccaggccagcagcggcaacagtttgctgtcggtggtggcgcagttgtccctcagcctcggcgtggcctgcgccggtgcgctgctcggcgggttcaccgccgaaaccggtaatgatggggtggaaagcgtactcggtgcgttccaactgaccttcctcaccgtgggcatcatggcgatgctggcggcggcgatcttcctgcaattgtcgccaaatgacggcaaacgagtagtcagccgcgagcacgacatcgagcattaacaggcttctcgtctagaacttgcagggaaattcccacgggactggtacactgcgcgacattttgttttgcagagccagtcccgtgactaccatcgccaccgcttttaatactttgcccctgtccgccgccatgctggctaacctcgactcgctgggttatgtcgagatgacgcagatccaggcgcaaagcttgccggtgatcctcaaggggctggacctgattgcccaggccaagaccggcagcggcaagaccgccgccttcggcatcggcctgttgaacccgatcaacccgcgctacttcggctgccaggccctggtcatgtgcccgacccgtgagctggccgaccaggtcgccaaggaaatccgccgcctggcccgtgccgaagacaacatcaaggtactgaccctgtgcggtggtgtgtccctcggcccgcagatcgcttccctggagcacggcgcccacgtcatcgtcggcacgccgggccgcatccagcagcacctgcgcaaaggttcgctggtgctggatggcttgaacacgctgatcctcgatgaagccgaccgcatgctcgacatgggcttctacgacgccatcgaagacatcatcagcaagaccccgccgcgccgccagaccctgctgttctccgccacctacccggtgagcatcaagcagctggcctcgaaattcatgcgcgcgccgcagcaagttaaagccgaagcattccactccgacgaccagatcgagcagcgtttctacgaaatctcgccggaagagcgcatggacgcggtgaccaaggtactggcgcatttccgcccagcgtcttgcgtggcgttctgctttaccaagcagcaagtgcaggaaaccgtggatcacctgacctccaagggcatttccgccgttggcctgcatggcgacctggaacagcgcgaccgcgaccaggtgctggcgatgttcgccaaccgcagcacctcggtgctggtggccactgacgttgcggcccgtggcctggacatcgactcgctggacatggtgatcaacgttgaactggcccgcgattcggagatccacatccaccgcgtcggccgtaccggccgtgccggtgagaccggcatcgccatcagcctggtcgccccgtccgaagcgcatcgcgcccaggccatcgagcaactgcagaagtcgccgctgaactgggaccaactggacaacctcaagccgcaaagcggtggcccattgctgccgcagatgagcaccctgtgcatcgctgccgggcgtaaagacaaggttcgaccgggcgatatcctcggcgcgttgaccggtgaagccggcatcccgggtgcccaggtcggcaagatcgcgatctttgacttccaggccttcgtggccgtggagcgcgggatcgccaagcaggccttgcagcgcttgaacgatggcaagatcaaaggccgttcgctgcgcgttcgaatcctgtaacacgatctccccttcaatggagatccaatgtgggagggggcttgcccccgatagcaatctatcagttaccgatgcgctgactgacacactgctatcgggggcaagccccctcccacatttgaatgtattccaactcagaacttgtatgaggacaccgttttgcgctcgaccgaagttgtgatcattggcgccggcgccgcaggcttgatgtgcgcgctgaccgccgccgggcgtgggcgcaaggtgatgttgatcgaccatgcgaacaaggccggcaagaagatcctgatgtccggcggtggccgctgcaacttcaccaatatgtacaccgagccggccaacttcctctcgcacaatgcgcacttttgcaagtccgccctggcccgctacacccagtgggacttcatcgcgctggtggccaagcacggtgtgccctaccacgagaagaaactcggccagctgttctgcgataacaaatccagcgacatcctcggcatgctgctcgatgagtgcattcaggtcggcgtaagcctgcacctggacacctcgatccaggaaattgccaggctggacagcggctatcagttgcagaccaccttgggcgagttgcgctgcgaatccctggtgattgccaccggcggcctgtcgatcccgaccctgggcgcgaccggctttggttaccaggtggccagacaattcggccacgaactgctgccgacccgcgccgggctggtgccgttcaccatcaccgaccagctcaaggacttgtgtggcgagttgtcgggtacgtcggtggattgcctggtcagctgcaacggccagagctttcgcgagaacatcctctttacccatcgtggcctcagcgggccggcgattttgcagatttcttcttactgggaatccggcgacacggttgaaatcaacctgctgcccgaccacgacgcccacacctggctgcaacagcaacaagccgagcgccccaacagcgaattgaaaaccctgctgggcgagatctttaccaagaagatggccaacctgctggccgagacgtggttcgcatccaagccgatgaagcagtacacccatgccgaaattgccgacatcgcacaaaaactcggcaattggcagttggtgccggcgggcaccgagggttatcgcacggccgaagtcacgctggggggcgtggacacgcgggaagtgtcgtccaagactatggaatcactgaaaagccctggcctgtactttatcggtgaagtgctggatgtaaccggtcacctgggcgggttcaacttccagtgggcgtgggcttcgggctatgcggccgcgcagtacgcctgaccgcaaaatgtactgagtaccaatgtgggagggggcttgcccccgatggcggtgcatcagtcaacgattgggtgactgacccactgctatcgggggcaagccccctcccacatggaataaattttcctgcccgatgtgatcaccacccttgccgtggcgtccttgatagctcaatttagcggcatcgtcccggaagactccagacttcatgtcatcgacctcgttcaagcagtccctgcggcgcctgtgggcactggataaattcagctacagcattcgggtattcatcgccctcaccggcagcatggcgctgtgctggtaccaggatgaaatgacactgctgatcccgctgttcctggggatcatcgccagcgccctggccgagaccgatgacagttggcaaggccgcctcaacgccctggcggtgacgctggtgtgtttcagcatcgccgcgctgtcggtggagttgctgttcccttatcccttgatcttcgcggtctccctggccctggccaccttctgcctgaccatgctcggtgccttgggcgagcgctatggcgcgatagcctcagcgacgctgatcctgtcggtatacaccatgatcggcgtggaccagcgcggcggcgccgtcagcgatttctggcacgagccgctgctgttggtggccggtgccgcctggtatggcgcgctgtcggtgctgtggcaggcgctgttttccaaccagccggtgcaacagagcctggcgcggctgttccgtgaactgggacggtacctcaagctcaaatcatcgttgttcgagccgatccgccagctggacgtggaagcgcggcgcctggaactggcccagcaaaatggtcgagtggtggcggcgctcaatgccgcgaaggaaatcatcctgcatcgcgtgggtaatggtcgccccggttcgaaagtcagtcgctacctgaagctgtatttcctggcccaggacatccacgaacgtgccagctcgtcgcactacccgtacaacgccctagccgaggccttcttccacagcgacgtgctgttccgctgccagcgcctgttgcgccagcaaggcaaggcctgccagaccctggccgagtcgatccagatgcgccagccgttcatctatgacgacagcttcgccgaagccctgggcgacctcaacgcgtccttggagcacctgcgcatccagagcaacccggcctggcgcggcctgctgcgctcgttgcgcgccctggcggccaacctgtcgaccctggaccgcctgctcggcgacgccagcaaccccgacagcctggcggacgccaccgacagcaacctgctggaccgcgccccgcgcaacctcaaggaaatgtggacgcgcctgcgcacgcagatgacgccgacgtcgctgctgttccgccatgcgttgcgtctgtcgctggcgttgaccgtcggctacggcatgctgcatgcaatccacgcgtcccaaggctactggatcatcctcaccacgctgttcgtgtgccagccgaactatggcgccacgcggcgcaagctcggccaacgcatcatcggcacggccatcggcttgaccgtggcctgggcactgttcgacctgttcccgagccccctggtgcaatcgatgttcgccatcgccgccggcctggtgttctttatcaaccgcaccacccgctacaccctggccaccgccgcgatcacgctgatggtgttgttctgcttcaaccaggtcggcgatggctacgggctgttcctgccacgtctgttcgataccttgctcggcagcctgatcgccggcctggcggtgttcctgttcctgccggactggcaaggccgccgcttgaacaaagtgctggccaacaccctgacctgcaacagcatctacctgcgccagatcatgcagcagtacgccgccggcaagagtgacgacctggcctaccgcctggcgcggcgcaacgcgcacaacgccgatgcggcgctgtccaccaccctggcgaatatgctgatggagccggggcatttccgtaaggaagcggatgtgggctttcgtttcctggtgttgtcgcacaccttgctcagttatttgtcaggactgggcgcgcatcgcgaaacccaattgccggccgaagtgcgtgaacatctgatcgatggcgccggcaagaccctggcggcgagcatcgatgaaatcgccacggggttggccaataagcagccgatcgcgatccagagcgatgccgaggaagcgctggcggcggacctggaacagatgccggatgagatcgatgaagggcagcggttggtgcagacgcagttggcgttgatttgccggcagctggggccgttgcgcacgttggcggcgcatctgatcaaggacaccagcgcggcttaggtcgctatcgggggcaagccccctcccacagttttgatttgtgaacacagtcaacaggtgggagggggcttgcccccgatgaggtccgcacaggcactacatgccatgggccttcatcagccgctcatagctgccgtcggccttcatcttggcaatctcccgatcaaagctggccacgatctgctcatgatcagggttcttcaggctgaccaggatgtgcaggctgttttcactcagcggctggggcaaaaactccaccgcattgcgcacccgtgccgattcacgcgagaggtaatagcgcgccacgtactcatcctccaccgtcaaccgcacccgctgcgccgcgagcatacgcacggccatggcgaagttgtgcaccgggactttctgcaactgcgcatccccatcgaacgccgccgaataggcatagccacgcaccacggcgatgggatagtcgtgcaattgcgcaaggttctggaattcgatgggatcgtcgcggcgcttgataaagcgcacacggttgagcaggtattcacctgagaattggcccagtttcgtacgggcatcgtcgtaccaggcgttgatcagcacgtcataacggccgtcgcccacccccatcagcgcacgggcccagggcacctgctcgaagtcactggcgtaacccgcacgggccagggcggtactgacgatgtcggtggccagcccgccattgatcaaggtggcatcggtaaagggcggccaggcatctgccaccagacgcagacgctgcgcgaatgccggctgggccagcagcaacactccaatcaaagcaacggcacgagagaatcgcggcatgctcaaagtccttggcaggcaggcggtggccttggctcaggcgcggcccgaggttctaacagtagctcagattacacaaagaaaccggtgccgaacgcactcaatgatggcaaattgatttcactcacaaaaatagttgatttagacagcgttgcccgctgcgcttactatccgcaacagacattgataagagaactcgccatgaccgttgaatgggtgtgcaaacaccacgatgacctgggcaaggagcagctttacgcgatcctgcgcttgcgcaacgaggtgtttgttgtcgagcagaaatgtgtgtaccaggatctcgatgggcaggatttgtcaggcgacacccatcacctgatggcgtggcaggacgaccaactggtggcttacctgcgcctgctggacccggaatcccagggcggcgacgtggtgatcggccgcgtgatcgtagcgccggtggcgcgcggcaccgggctggggcatcggatgatggaagagacgctcaagcagattgccgatatctggcctgagacaccgatgttcctgtcagcccaggcgcatttgcaggggtattacgggcggtatgggtttgtggtggcgggtgaggaataccttgaggatgatattccacacatcggcatgcgaaaggatcaggggtagcccagcacctgcttgatctggccgaggttcgcctcgatccaacgccgatcaatcgcgccccagctgcgaatccgatagtgcccggcatggttgcgggcaccgtcttcctgctcgaactcacacacaatatccagatcggacaatgccgcaatcgtgtcctgcgccgtgcgccggggcatgccggtggcgtcggtcagggccgggacgctgctggcctggccgctgtcgatcaggtaggccacgtacaggcggcggtagaagctgctcttggtcttgctcacatccatggtcggttgccttgtgcggtcagggtttgcccagcaggtcgcggtacgtgaggtacacccgcaggttgaattccacctgatggtagcccggcatcatgtactcgcagagtttgtagaacgccttgttgtggtccgattccttgaagtgcgccagttcgtggaccacgatcatgcgcaggaactgcggcgcggcctccttgaacagcgcagcaatgcggatctctttcttcgacttcagattgccgccctgcacccgcgagatggtggtgtgcaggccgagggcgcgatgagtcaggtccaggcgattatcgaacagcaccttgtcgatggccggcgcattgcgcaggtgttcctgcttcaaggccagcgcgtaggcgtacagggccttgtcgctctgcaccgcgtggcgttcggggtaacgttgctccaagtaggcacccaactgatccttggcgatcagctggcgcacttgctcctggagggcggcgggataggcctggaggtatttcagcgcggtcatgggctctgcaacagggttcggatggccgccagtgtagcgaattcagcgcaggcgagcgtggcaccagtgtgccacttcctcagccatcaacggctgcgccgccatcgggccctgaatgaatgggcaaccattggccttgagccattgggcctgctcctgggtttccaccccctcggccactaccactacatcaaaatgcttgcacaactcgataatgctgcgcgccatcacctcatcgcgcaccgagcccggcaggcgagcgaccaattgcgggtcaagcttgagggtatcgaaggccaggtcgcgcagatgcgccagggaacaattgcccaagccaaagtcatccagggcagtgcgcacgccgatctggcgcagcaacttgagctgcttgaccgactcatcaaggttgctcatcaggcagtcttcactgatttccacctccagttgccgcccctgcagcccatgtcgctcaagcacctgctgcagttggctcgccaggttgggcatgttgaactggttgctgctcaggctcacgctgagcaccagttcatcgtcgaagccggcgtgccaggcctggagttgggcgccgacttgttggtaaatccaggtgctgagctggctgatcagccgggcttcttccagcaatggcagaaacagaccgggcggcacatcgccgacactcgggtgctgccagcgcaatagcgcttccacaccgcgcacacgcccgtccgccaacgccacctgcggctggtacaccagggtgaactccttgttttgaatcgccgtgcgcacgctgtcttccagcatcaggcgcgaacgggcgcggccattcatttcctggtcgtaatagcgatattgctgacggcctgcgcgcttggcttcgtacatggcgatgtctgccgcgcgcaacagaccgttaatgtccgagccgcaatccgggaaggtggcgataccgatactgacaccgagcatcacatccaaaccttcaacttgctggcagatagacacccgttcgatcagtttttctgcaattttcgccgcctgctcggggaactccagctccagcaacgcggtgaactcatcgccgcccatgcgccccagaatgtcataggaacgcaggcagccctgcaactgctccgatacccagcgcagcacacggtcgccggcgtcatggccaagggaatcattgacccgcttgaagccgtcaaggtccaggtacagcagcaccagagactgctcgttgcgctcgctgcgcagcaaaatgttttcagccgcctggtaaaacccgcgccggttcaacagtccggtcagcgggtcggtgaccgcctggaactccaattgttgatgcaggtgacgcacttcggacatgtccagcacggtcaccaccatggccttctgttcggccggcagcggcgcgcacgacaacgccaccggcacctgctggccgcggctggtccgcaggatcgcatcgtgcaagcgccaggtctggccctggcggtaagcgaggaacatctcgaaccccagccaggccggtacatggggcttttgcaggaagctcaggaaactctcgcctcgcaactcggccagggtagcgttcaacagccgcgaaatggccgggttggcatactcgatcacgctgccctcgcccaccaccaggatgccttcggcggcgttgtccaacaccgaggcattgaacgcccgcgccgactccagctcatggctcaggcgctgcaaggcccggcgattgcgctgatgttccagcaacgcctggaccttgggtttgaggatgtgcgggtcgaacggtttgaacaggtagtcgatggcgccactggcatagccttcgagtactgcggccggcgactgggcgtgggccgtgaggaaaatgatcggtgtcatgcgcgtgcgctggctgccgcgcatcaggcgcgccacctcaaagccgtccatgccgggcatcttcacgtccagcagcaccaggtcgacttcatgtttgagtaacaactcgagggcttccacaccggacgcggcggtcaccacatgccagtcttcacgctgtaacagcgcacgcatgctaagcaggttctccgggtagtcatcgaccacaagcagaaccgaatgaccatcgccgtggtgtggagcgcattccatgctacgtctcttccttaggactactccggtcatttctgacagaaaacccggacaaacactgaggcctcactctagccccggttcagaaaaagcagaagtaacctcagtgccatcattgcgccaatcttcaggaagccgactaacggtcaaccgctacaagccacgaaccatgggaaacatggctttttggcattcctttggcgccaataaatcgccagcaatgatttaacaagatggttaacaccacctataaagaacctgtctggcccaagggccatagcctacacccctctgtaaaaaggcctacgccatgatcgacctatccacctggaacctcagcatccctgtcggctctccgcccgcgaccatcgaaaccccaagattgatgagcggcttcaacgaccaatatttccaggccgaaggcagcaacgtccaattctggaccccggtcaccggcacccgtaccgagaacgccatttacccgcgcagcgaactgcgcgagacctacgccgatgggcgcctgcgcaactggacctatccggatgcggacaacttcctgcgtgccaccctgtccgtcaaccaagtgccgtcctccggcaaaatcgtgatcgggcagatccacgcctatgacagccagaaaccgctgatcaagctggaatatcagttcaaggaaaagacccagaccggcaacatcgtcgccaaagtacgcatgcgcccggatgaggatgaagggcgcacgatcatcgtcgcctccaatgtgccgctggagaagagctttacctatgtgatcaacctcaacaaagccgggctgctcagtgtgtatgccgcggatggcgagtggaacgaacgcatcggcgcggcgtggggcgccaagccgttgtacttcaaggccggggcgtatgtgcaggacaacagtggcaacagcaaggaaggggcgcgggtgacgtttgccaaattagatattgatcacgagtaaggttatttcaatcatcccccgctacggcgggggaatgattacttggatataacgaactccgaagatcgtcttaccgctatagcaaaacagcataaaaattactatttcttgcagtgtgcctattagggcatacctcataaaatcatgtgcgtccaactcatgaaccgttcaggagttaaacacatgccaacgctagccaccattaaccaacctgccgtctcggggttcggcaccgggtcgcaaccaaaaatatacaatgccaccccaccgggttcttttgcgacgccgccccaaaacatgccagttgtcaccaggcccttcagatatctggtcttgtcgcacttattgagcaacaacaccaggattggcgatgtgctgacttattattgctaccctgtgccgtccgcaggtcttcctaccatgcttctggaacaaataacgcttaccgccgcgctgctacaatcttatatcaacaataaacgcgaacattttgagaaggaaatacaatgctaccttccaaacccaggaacctatgacgtttactgggagcttgaaaatgcatctcaaacatatacggagataggacagaatctgagatttacagtggtataactatagtaagcacaaagttggcttatttaatacctgaaaaactactgcgttacccacaatgaaaactactcactgtccttaggcaactactttacacctataaaaaacccgcatttctgcgggtttttttggcgctattggcttagttcaccttagcgttcaactcacctttcaaataccgctggtacatcgcttccaacgagattggcttgatcttcgaagcattgccggcagtaccgaacgcctcataacgcgcaatacacacatcacgcatcgcggtcacggtggcgccgaagaatttacgcgggtcgaattcgctcgggttggtggccatcaggcgacgcatcgcaccggtggacgccaggcgcaggtcggtgtcgatgttgaccttgcgcacgccgtacttgatgccttcgacgatttcttcaaccggcacgccgtaggtttctttgatgtcgccgccgtactggttgatgatcgccagccactcttgcgggaccgaggaagaaccgtgcatcaccaagtgggtattggggatgcgcttgtggatttccttgatgcggtcgatggccagcacgtcgccggtaggtggcttggtgaacttgtaggcgccgtggctggtaccgatggcgatggccagggcgtcgacttgggtctttttcacgaagtcggcggcttcttccgggtcggtcagcatctggctgtgatccagcacgccttcggcaccgatgccgtcttcttcgccggccatgccggtttccagggaacccaggcagcccagctcgccttcaaccgaaacaccacaggcgtgggccatggctacggtttgctgggtgacgcgtacgttgtactcgtagtcggtcggggtcttgccgtcttcgccgagggagccgtccatcatcaccgagctgaagcccagttggatggaacgctggcacacgtcagggctggtgccgtggtcctggtgcatgcacaccgggatgtgcggaaattcttcgattgcggcgaggatcaagtgacgcaggaacggcgcaccggcgtatttgcgggcaccggccgaagcctggacgatcacgggggagtcggtcttgtcagcggcttccatgatggcgcgcatctgctcaaggttgttgacgttaaaggctgggacgccgtagccgaactcggctgcgtggtccagcatttgacgcatgctgataagtgccattgtgttgtctctcccggtcgagggtcgttaatcgtgcaagcctgccgtagcggcggctgctattcaagttattgcagaccaggctttacacacctggcttgctgaatcgttattgctgtcaggcttactgcgctttgcagccacgcccgatcaaatcatcggtggcgacccagtaaaccaggccttcctcaccttttgtgtgaaacgccaattggccgtcgctgtacagcacgcccgaggcggcaacgtcctgcttgaggcggtaaacctggtcggaaccgcccaaacggacatccacctcggatttggcctgattagcaaagcgccagttcacctcagccttgctgtcgcaggtccacgtggtccacttgtcggcagtttctgccttgttgctgaacatgttcatgctgctgcagccggccaacagggccagggctgccagggcgaaaacgcctttcattgccaatcctcgtgaggcgaccgacggccgccagttgatcagacccatcaagggcaaccctgttcctgaccgttgggcgcggcgtcgtatttctccagccgttcgttgccgatgcgcttgttgatcaccggcatggtctcggcttgccagtcggcctggtagcagctctttttctgcccgggggcaggttcatctgccgcagacttcgcgttcggcgtgctgccgcaaccggccaacaggcccgctgcgatcaccaatgccaacgacttgatcatgggaatactccttttccggatcacgagcctcagcctttggctcgggtttccagcacttcaacggctggcagtaccttgccttcgacgaactcgaggaacgcaccgccaccggtagaaatgtaggagatctggtcagcaacgccatatttatcgatagccgccagggtgtcgccgccgccagcgatggagaaggccgagctttcagcgatggccttggccagcactttggtgccgttgccgaactggtcgaattcgaacacgccgaccgggccgttccacaggatggtctgggaggctttcagcagctcagcaaagttggccgcagtttgcgggccgatatccaggatcatgtcgtcggcagccacgtcagcgatcagcttgacagtggcttcggcgctttcggcgaactccttggcaacgacgacatcaaccggcagcggcacgctgactttggcagcgatggcacgagcagtgtcgagcaggtccggctcgtacagggacttgcccaccgggtgaccggcagccgccaggaaggtgttggcaatgccgccgccgacgatcagctggttgcagatctggctcaggctgttaagcacgtccagcttggtcgacaccttggagccagccacgatggcagccatcggttgcgccggcgcgcccagggccttgcccagtgcgtccagttcagcggccagcagtgggccggcagccgcgaccttggcgaacttggccacgccgtgggtcgaaccctcagcacggtgagcggtgccaaatgcgtccatcacgaacacgtcgcacagcgccgcatattgctgggccagttcgtcgctgttctttttctcgcccttgttgaagcgtacgttttcgaacaacacgatgtcgccagctttgacgtccacaccgcccaggtagtcagccaccagcggcacgtcgcggcccagggccttgctcaggtaatcggcgacaggcttgaggctgttttcggcagagaactcgccttcggtcgggcgacccaggtgggagcagaccatcacggccgcgcctttttccagggccagcttgatggtcggcagcgaggccaggattcgcgcatcgctggtgacaacaccgtccttgactgggacgttgaggtcttcgcggatcagtacgcgcttaccttgcagatcgaggtcggtcatcttcaacacggtcatgggtcgcagttcctgaattactgttgatgaggttgtttagaggcgatgtgcagataatgttccgcaacatccagcattcggttggcaaaaccccattcgttgtcgaaccaggccaggatgttcaccagcctcgggccggaaacgcgtgtctggctggcatcgacaattgccgaatgcgggtcatggttgaaatcgcaactggcgtggggcagctcggtgtaggccagcaaacctttaagcgggccgctggtggcggcgtcgcgcaggatccggttgacctccgtcgcatcagtgtcactgacggtctgcatggtgatgtccaggcaggacacgttcaccgtcggcacccgtacggctttggcctggattcgcccggcaagttccggcaacagtcgctcgatgccccgggccaggccggtagacaccggaatcaccgattggaacgccgaacgcgtacggcgcaggtcctcgtggtgataggcgtcgattaccggctggtcgttcatcgccgagtgaatcgtggtgatcgacacatagtccaggccgatcgcctgatccagcaggcgcaacaacggcacgctgcagttggtggtacaggaggcgttggacaccagcagttcattgccggtcaggcaatcctggttgataccgtagacgatggtggcgtcgacatctgcctcgctggccatcggctgggaaaacagcacgcgtggcgcgccggcgtcgaggaaacgctggccatcggcacgggtgtggtagacaccggaacattccagcaccaggtcgacgcccaatgccttccagtcgatggcttcgggggtggcacagcgcaacacctgcacgcagctgccattaatgtgcagacaatcgccctcgacccgcacttcgccggggaaccggccgtgggtggagtcaaagcgtgtcaggtattcaatgctggccatgtcggccaggtcgttgatcgcaacaatttcaaacccggccgccgcccctcgctcgaacagagcacgcaagacgcaacgaccaatgcggccgtagccgttgagtgcaactttgtagggacgcggttgaggcatggggttctcgatcaagggtagttcggtgttgaaagcaccatcgccatcgcgggcaagcccgctcccacattnnnnnnnnnnnnnaatgtgggagcgggcttgcccgcgatggcgccagtacagacaacgcagactgacttagtcttccagcagctcttcagcctggcccaggatgttttccagggtgaaaccgaactcttcgaacaacgctggcgccggcgccgactcaccgtaggtggtcatgccgatcacgcggccttccaggcccacgtacttgtaccagtagtcggcgtgagccgcttcgatggcgatacgcgcgctgacctgcaacggcaataccgactgtttgtagccggcgtcctgggcttcgaacacgctggtgcacggcatcgacaccacacgcacgttgcggccttgggcggtcagcttgtcgtacgcctggacggtcaggcccacttcggaaccggtggagatcaggatcagctccggctcgccgatgcagtccttgagcacgtagccgccacggctgatgtcggcgatctgtgcgtcggtacgtacctggtgttgcaggttctgacgcgagaagatcagcgccgaagggccgtccttgcgctcgatggcgtgcttccaggccacggcggactccaccgcgtcggctgggcgccagcaatccaggttcggcgtggtgcgcaggctggtcagttgctcgaccggctggtgcgtcgggccgtcttcgcccaggccgatggagtcgtgggtgtacacgtggatcacgcgcttcttcatcagcgcagccatgcgtacggcgttgcgcgcgtattccatgaacatcaggaaggtcgcgccgtaaggcaccagaccgccgtgcaaggacacgccgttcatgatggcgctcatgccgaactcacggacgccgtagtacatgtagttgccgctggcgtcttcagccgagacacctttgcagcctttccacagggtcaggttggaaccggccaggtcagccgaaccgccgaggatctccggcagcaacgggccgaaggcattcagggtgttctggctggctttacggctggcgatggtctcgcccttggccgcgacttcggcgatgtaggccgaggctttttccgagaagtcggcaggcaggtcaccggccaggcgacgtaccagctcgttggccagctcagggaattcggcggagtaggccgcaaaacgctggtcccactcggcttcggtggccaggcctttttccttggcgctccactcggcgtagatgtcggccgggatttcgaacgggccgtggttccacttcagcgcttcacgggtcagggcgatttccgcgtcacccagtggggcgccgtggcagtcttctttgccctgcttgttcggcgagccaaagccgatggtggttttgcagcagatcagggtcggctgtgcgctcttgcgggcggtgtcgatggcggtcttgatttcttccggatcgtgaccgtcgacgttgcggatcacctgccagttgtaggcttcgaaacgcttcggggtatcgtcggtgaaccagccttcgacttcgccatcgatggagatgccgttgtcgtcgtagaaggcgatcagcttgcccaggcctagggtgccggccagggaagcgacttcgtgggaaataccttccatcatgcagccatcacccaggaatacgtaggtgtggtggtcgacgatgtcgtggccaggacggttgaactgcgcgcccaggactttttcagccagcgcgaagccaacggcgttggccaggccttggcccaggggaccggtggtggtctcgacgcctggggtgtagccgaattccgggtggcccggggtgcgactgtgcagttggcggaagctcttgaggtcgtcgatggtgacgtcgtagccggtcaggtgcagcagcgaatagatcagcatcgagccatggccgttggacagcacgaagcggtcacggtcggcgaacgacgggttgctcgggttgtgtttcaggtagtcacgccaaagtacttcggcgatatccgccatgcccatcggggcaccgggatggccgctgttggctttttgcacggcatccatgctgagggcacgaatggcgttggcacgctcacgacggctgggcatcgctgatctcctgaggtttgaatataaaagaaacggaaaaaaggaccggcattttccctcagccaccgcctgcgggcaatgacagatagtcacttgagggtgtttttcctgtgctttgggcaccaatcgcttgcagaaacctttaaccggttcgtctaaaggttatagcggccgcttataaccgccacttatcgatcaatatcaaaactttttgatattggccttgcgagcctgtcgccccatcactagactgctggccttatgaatctacccatgccctcactgcgtgccgacgacggcgatgaactggcagccttgtgcaaggccgctggcgacccgctgcgtctgaacgtgttgcgcgcgctggccaacgattcctttggcgtgctggagctggcgcagatcttcgccatcggtcagtccggcatgagccaccacttgaaggtattggcccaggccgatctggtggcgacccgccgtgaaggcaatgcgattttctatcgtcgcgccctgccccacaccgaactgctgggcggcaagctgcacaccgccctgctcgaagaggtggacaacctgagcctgccgcttgatgtgcaatcgcgcatcggccaggtccacgggcagcgcgccgctgccagccaggactttttcgcacgggtggcagagaagtttcgtgcccagcaggacctgatcgcaggcctggctcaataccgcgacagcgtactggcgctgctggacaagctgagcttcagtgacgaggccacggcgctggaagtcggcccgggcgatggcggtttcctgccggaactggcgcggcgctttcaccaggtcacggcgctggacaacagcccggcgatgctcgacctggcacgccagctctgcgagcgcgagtcgctgggcaatgtccgcctgcaactggccgacgcactgagcagcacgacaatcaaggccgactgcgtggtgctgaatatggtcttgcaccatttcgccgcccccgccgaggccctgaagcaaatggccgggctgctgcaccccggcggtagcctgctggttacggatttatgcagccacaaccagaattgggccagggaggcctgcggtgatctctggttgggttttgaacaggatgatctggcccgttgggccaccgctgcgggactcgttcccggggatagcctctatgtaggtttacgcaatggtttccagatccaggtccgccattttcagcggccggctggcgacactcaccatcggtaaatatcaggaaaacatcgagatgagcgaatactcccttttcacctccgagtccgtgtctgaagggcatccggacaaaatcgccgaccagatttctgatgcggtgctggacgccatcattgctgaagacaagttcgcccgtgtggcgtgcgagactctggtgaaaaccggcgtagcgatcatcgcgggcgaagtgactaccaccgcctgggttgacctggagcagatcgttcgtgacgtgatcaccgacatcggctacaccagctccgacgtcggcttcgacggcgcgacctgcggcgtgatgaacatcatcggcaagcagtccccggacatcaaccagggtgtcgaccgcgccaagccagaagatcaaggcgccggcgaccaaggcctgatgttcggctacgccagcaacgaaaccgacgtgctgatgccagcaccgatcaccttctcgcaccagcttgtgcagcgtcaggcagaagcccgcaaatccggcctgctgccgtggctgcgcccggacgccaagtcccaggtgacttgccgttacgaaggcggcaaagtcgtgggtatcgacgcggttgtactgtcgacccagcacaacccggaagtttcctacgccgacctgcgcgaaggcgtcatggagctgatcgtcaagcacgtgctgccggccgagctgctgagcaaggacacccagttccacatcaacccgactggccagttcatcatcggtggcccggtgggcgactgcggccttaccggtcgcaagatcatcgtcgacagctacggcggcatggcccgtcacggcggtggcgcgttctcgggtaaagacccgtccaaggttgaccgctcggcggcctacgctggtcgttacgtggcgaagaatatcgtcgcggccggcctggctgagcgttgcgagatccaggtttcctacgctatcggcgtggcccagcctacgtcgatctcgctgaataccttcggcaccggcaagatcagcgacgacaagatcgtcaagctggtgcgtgagatctttgacctgcgcccttacgcgatcaccaccatgctcgacctgctgcacccgatgtaccaggaaaccgcagcgtacggccactttggtcgtacccctgcgcagaagactgtcggcgacgacaccttcaccaccttcacctgggaaaaaaccgaccgcgccaacgacctgcgtaccgccgccggcctgtaaccgctcaaggtgtacaaaagcctcgccgggtttgcccggcggggctttttattgcaccgcacgttgcgcgacgcccctcacattttttggatccaatgcttgcaggcccaatgatggccctctagaatccgcgccctctcgggcctctcaccttatttggatattgccctgcgccagcccgggagtcccaagcgtgcaggcaatcgaacattgaggtttttcatgcgcatctccacgctcgcccccgccgcccttctgctcagcctgttcgccctgccggcccacgccgccgacctgagcgcactgagcggcgccctgagctcgcagctcggtggcggcaattccggcgactgccagaagcaagccgcagacctgcaaaccaagatcgatgcagccgaagcccagaaggacaccttgaaagtgaaggccttcaaggccgcgcaagaccagatcaacaaaggctgtgacaaactttccgaagcgcaggccaaagccgatgccaagcagcaaacacaggaagccaaggccgataaacctgacgcggtgaaagccctgggcggcctgttcaagtaaacagaaacacccggtaaaaagccccgcactgccggggcttttttgtggccgcagggttccattaggctgggcacccttttcgagcaaggatgctcatgatgcgtctactgatggcccttttactcagtattttaccgttcagcctatgggccgaagattgccccgacgatgctcgggcccaggtcagcaccctggccaaacaaatccgccagtgggatgacagctaccaccggctcggccaatcccctgtgagcgatgaactctacgaccaggcccgcctgcgcctggcccactggcgccagtgcttccccgacacccctttgacgcccgacaacccactggcgagtgcacgcggtacccggctgcatcccgttgcccataccggcctggagaaactgctggatgaacaggcagtcgctgcctggctggccacccgcgaggatgtctggattcaaccgaaggtggacggtgtggcggtgaccctggtgtatcgcaaggggcgcctgagccaagtcatcagccgcggcgatggagcaaagggccacgactggtctgcctccgcgcacaaaatccccggcatagtccagcagttgcccgagcgcatcgacctgctgctgcaaggtgaactctattggcgcctcgatggccatgtgcagtcggccaccggcgggctcaatgcccgtagcaaggtggccgggctgatgaaccgcaaacaattgagcgacaccgacgccgcaggcattggcctgttcgtctgggcttggccgaaagggccggcagcgtttaccgagcgcctggccacactggaacgctggggcttcaccgatagccgacgctacagccaccccattcgagacatcaccgaagccgcgcattggcgcacctattggtacaaccatccattgccgttcgccagcgacggcgtggtgctgcaccaggcgcagcgcgcacccgccgaacgttggcaggtcgttgcgccgtattgggcgactgcatggaagtacccggccgccaaagccctggcactggtgcgcaacgtgcagttcaagatcggccgcaccgggcgcatcacccccatgctggaactggagccggtacgcttggacgaccggaaaatcagccgggtaagtgtcggctcattggcacgctggcaagcgttggacatccgacctggcgaccaggtctccatcagcctcgcgggccaggtgattcctcggttggacgcggtcattctgcgcagtaccaccagggtggacctgccagtgcccaaccctggcaaattccatgcgatgagctgctggcaactggaccccgattgcgaggaacaattactggcacgccttacctggctcagtggcaaccagggcctcgcgttgccacacataggtcgcgagacctggaacgtattgatccaggccggtctaatcgcaggctttctcgattggttaaccctggacgcggcagagcttgctaacattgatggcttcggtgatcgcagccgcgaacgcgtgctcgaaagccttcacagcgctcggcagcggccctttgcacaatggctcaaggccctgggtgtaccgcctgcggcacgtaataacctggagggcgactggcagacgctggtcgccagagacacccaggcctggctgaacattgatggcatcggcccgggccgcgcagcgcaactgagcgctttttttcgcgacccgcacgtacaggccttggctgaatcattacgcatggcggggatagacgggttttgaaccccgctgcccccgccatcagattgcgactttggagccccacatgaaatttctagccccttttgccttgctgaccgtcgcaagcttcatgaccacaccgttgctggccgctgaacaagccgcccccctcaccggctgcgccgccaaacgccaagccatcagcatccagatcgaacaagccaaggcccacggcaacagcgcgcaacaagccggcctggaaaaagccctgagtgaagtcaccgccaactgcaccgacgcctccctgaagaaggagcgtgaaaacaaggtgctcgacgccaagcacgaagtcagccgccgtcaggccgacctcgacaaggccatgaaaaaaggcgacgcggacaagatcaacaagcgtaaggataagctcgccgagtcccgcaaggaactgcaggacgcggtggaagagctcgaccagtaaaaccggtcagtggtcacggaactgtttatggcaggcgctgcaggcatcttcgactttctgcaccgccggccccaggttactggccttgtagggctgcacttggctggcagtcaccaattcgccggtggccgcttcaaggttgcgggccagttgctggaattgcgcctgtttctgccagacatcgtccttggcgctggtgtgatcttcttcgcgcacgcttgggaaatgtttccaaggctcatgggacaaggcgtccagcttgaccgcaccctcggcaaatttggcgccgtcgaacgggatgcgcccacgcaacatgccgcccaggtcttcgccggtcttgagcatctgtttgaagattgccttgcgctggcccagcggcgaattcggatcaacaccgccacaggcggacagggccaggcaggccagcagtacaacagtcagtcgtttaaaagtcatggtggcttcgaggtcacgggaaacggcggccagtatcctcgccccgcccataaagaccaatagccctattaataataagggttgcccaaaggtgttaccgcgcgggcaatcgcttcaggaagtgtttgtatgaatgtaacctttaaaccctggagccgccgcctggcgtgggctctgccgatgatcgcgctgctggccggctgcgacgcgggcaaagaagcagccaaagatgaaactcccaagccccacgccgtcgccacctatgtcagtgcgccgtgggaggcgttgccggcggtgtctgacaacgacctgctggccggttttgaatcctggcgcagcgcctgccagcgcctcaaggcagacccgatctggggcgcgacctgcgcagccgccgctacggtgcccggcaatgccgtggccgtgcgcgggtttctcaaggagcgtctggatgtgttcggcctgcgctcggccgacaacaccccgaacggcttgatcaccggttactacgaaccggtctaccccggcagcctgaccaagaccgccaaggctaacgtaccggtatatggcgtgccggacgacttgatcatcgtcaacctggaaagcatctacccggagctcaagggcaagcgcctgcgcggtcgccttgaaggccgtgtgctcaaaccgtacgacgatgccagcgccatcaacggccagggctctaccgccaaaccgattgcctggctgactgacccgatggacctgcaattcctgcaaatccagggctcaggccggatccaactggccggagggcgccaactgcgcgtcggttatggcgaccagaatggctacccctatcgccctatcggccgctggttggtggagcaaggtcagttgaagaaagaagaggtgaccatgggcgccatcagcgcctgggccaaggccaacccgcagcgcatcccggaactgctggcgagcaaccccagctacgtcttcttcagcgcccgccccgacagtaacgaaggcccgcggggttcactgaacgtgccgttgaccgcaggctacagcgttgcggtggatcgcaaggtgattccgctgggcagcctgttgtggctgtcgactaccaaaccggatggctcacccatcacaaggcccgtcgccgcccaggacaccggcggtgcgatcacgggcgaagtgcgcgcggacctgttctggggcactggtgaggcagcgggagaattggcgggcaacatgaaacagcaggggcagatatggatgttgtggcccaagggcgcagcattgccacaggtgccggatgcacctgccgggacctgaaagcggtctgtccagcttggttcagtggggtgagcggccttgctagtgggcaagcttggcctgttgtggtgagcgggcttgccccgcgttgggnnnnnnnnnnnnnnnnnnnnnnnnnnnnnnnnnnnnnnnnnnnnnnnnnnnnnnnnnnnnnnnnnnnnnnnnnnnnncccaacgcggggcaagcccgctcaccacaacaagcacgctcataacacaaaaagcacgctcaccagcaaagcccacacccacaggggacctgcttcaaccgtcagatcgagacgaagaagaaactcgcaatcaacgccatccccacaaaccacaccagcgaacgcagcatcgcccagtccgccagatagcagatgatgtacagcaggcgactggtgataaacagcacggccagcacattgatggtcaccaattcggccgtaccggccaggtgcgcgataatcacggccgccgcaaacgccggcgtgacttcaaagctgttgagttgcgcactgtgggcccgcttggcaaacccttcgagggtgtccaggaaagcgcgggggtcgtggttctgccgtggtccgaacttgccaccactgaacttggccacgcctgtgcacagataaggcaggaaaattgcgatcaacacacaccagaaggccaccgtcatcactgattccttttttaattttgttttaagttttaaacagaaattagagttttagcactaaacctgtaaaaccgcacccaccgctatgaaccgctgcgctcggaaaggttctatcggtgatttgcccacacgcctgcaacatcgcaccactgttgcggtccatcccccatcgacgctctctccccaacttccaaggaccccggatgctcgaacttgtcgccgcctttatttgccttaccaccctgctcacctacgtgaactttcgctttatcggcctgccacccaccatcggcgtgatggtcacagcgctggtgttttcactgatcctgcaaggcttgagttttctcggctaccccggtcttgaggaacgcatccagcaactgatcggccagatcgacttcggtgatttgctgatgaactggatgctctcgttcctgctgttcgccggcgccttgcacgtcaacctgaacgacctgcgcagctaccgctggcccatcggcctgctggcgacctttggcgtgttaatcgccaccgtggtgatcggcagcctggcgtattacatctttgccttgtttggctggcatgtaagcttcctctactgcctgctgttcggcgcgctgatctcgcccaccgatccgattgcggtactgggtgtactgcgtaccgccaacgcctccaaacccctgaaaaccaccatcgtcggcgagtcgctgttcaatgacggcacggcagtggtggtgtttaccgtattgttgggcatcgcacagctgggcgagacgccaaccgtgggcgctaccgccatgctgtttgcccatgaggccatcggcggcgtggtgttcggtggcctgatcggctacctcgtttacctgatgatcaaaagcatcgagcaacaccagatcgaagtgatgctgaccctggccctggtgatcggaggctcggcaatggccaccgaactgcacgtctcggcaccgatcgcgatggtggtcgccggcctgatcatcggcaacctggggcgcaagctggcgatgaacgacatgacccggcgctatctggacggcttctgggagctgctcgatgacatgctcaacgccctgctgtttgcactgatcggcatggaactgttgctgttgccgttcaactggctgcacgtgttcgccgccagcctgctggccgtcgcgatcctgctgtcgcgcctgctgacagtcgccccagccattctgttgctgcgccgctggcgcacggtgccacgcgggaccatccgcatcctgacctggggtggcttgcgtggcggggtttcagtggcactggccctggccttgccactgggcccggagcgcgatttgctgctgagcatcacctacatcgtggtgctgtcgtcgatcctgctacaggggttgagcatcggcaagctggtcaagcgcgtgacccaggacgagccccaggccacgcctgacactcactgatccttgttgatccgctgcggatgcctggggtccgcagcttttttgctcggcaggctgctttcactgcgaatctgtgcgtgactgatcagtgcaaagataaagctgccgccaatgatattgcccgccagggtcggcccggcgaacaccagccagaagtccttccacggcaactcgccggcaaacaccaggtacgacacttccgccgagccgacgacgatatgggtgaagtcgcccaatgccatgaggtaggtgatcagaatgatgatccacatcttggcactttccatggacgggatcatccacaccatggtggcgatcatccagccggaaacgatgcccttggcgaacatctggccggggtcgttctccatgatcttgcgcccgatctcaaggaacgccatgtcggtcctggtatcgaagatcggcaagtgcagcatcacgtacgccaccagcaaggtgccacacaggttacccaccagcaccaccgaccataaccgcagcaggcgaccggcattgcccagggtgggcttgctcatcaccggcagcacggcggtcagggtgttttcggtgaacaactgctggcgcgcgagaatcaccgcgaggaagcccgcgcagtaaccgaagctggcgatcaccttgaacgcttcgccctccggcagacgggagttgagcaaccccatggccatcagcgacagccccatggtcaagccggccgccagcgccgaccaccacagggcggcaacgctgcgctcaagctcctggtcgccctgggtgcggattatttcatgcagtaccgccgcgcggggcggctggttcttgtccacgtcctgctgctcttcctgcgacaggttgggggtcttgccgtctgtttgagtggccatgatgtaccagagtccgaggggtgcctgtagctacgacacgccacggcgatggctgttcagtggcctgacgactaaaccggtatgcgccaggccttggcggcttccacagtggtagatctgaacggggtgctccagggtttattgcgcgccttgtagtatttgacgatgccttcgagcacgttgttgaacgctggtggtgtcctggcatccgccaagtcacgggccgcacgccgcagcagctcgatattggcctgcggctggccaggccgatagagcgacgggtagatgacttcccgcgtgaagttttcggcctttaccgcaagatcacgcctgctcatctgcgcaaccgcgctcgtcatgactttcgacatcgccgctgtgtcgccaggtgactgcttgctcatcacttgcagaagctgctgaaaattaggcctgccgactgcattgagacgccgccccaaccactcgacatactcgggacgacgcgccagcgcatccagattacgcaacgccgccgccaacctgggagtcaccgtcagcttgtcactggcctgattggcttcggtaatggcggcctccagcgcctgcatcgcttgctgtgcgctcttgcgaaacatcagcacatccttggcggcgggatccttctccagatcactctcaacgctcgccagcattttgtcgtccatggccaacacagcgacgtccaatgagcggaattggtagcgttcacgcaacgcggcacgcgtgtccagatgtgcgctcaccgccgcacgcgccgacgcctgcagatgctttttctgatcgtcggtcatggtgaagttaaccgtgccattgagcaggttacgaaagtcacccttttctgatttcagcggtaacacgacagtctgatccgcttgcgccttgagcttgtcttcctggtacccctcggcagccgcatgcgggacacccatgatcgtatcgaccaggccgctccccacgctacctgccttggcaggctccaggttttcagtttcaaacctgacgaccagtgactcggtcttgcacagggggctttctggaaaaggcggatcaatcaccgcagaagacggcgtattgaccagcagtccaccatccagaaatgccttttgctcagcgtgctcctggaaggcatggccttgctctttcgggcttttgaacaacccaggcaatgagccggatatgtgagccgccctggcaatatccatgtccggggtggtgctggaattgaagaccaccaactgtggtcggccatcgaacagaccggttcccgtgatattgagctgcttgaccgcaggaatgtgacgactcaacacctcaatatcgcgaaaagtcggccctttccctgcactgagccggtccgcaatcttcatgacgtcggcaggccggtcttcccgccgggtcccggcgatctttgccagcagcgacttgcgcgcctcattgccgatcaggtcttccaggggctgcgcttcggtttgcaggcgcggtatcagggtgaacaataattgcgcgatgtttccggccgttcctggcaagcgccctgccaattttccaatttcagtactggcattctgcagctttgcaatcaaaggattcttgctgttcagcaactcaggcaggttgaggccgttcgacaggcgtgcaaaagttttggcatccatgccactggccagcaacacagcagaaattgcgcccgcggatgagccggagatcactttgacgcccaccaacgccttgtggtcttcgagcgcctggaccatgcctgggaacgcaatgcccttggccccgcccccactcaataccagatgtgtgagcggcggcggtgacaaaaccacctccacccggccatcgctggagcgctcaaggctcaccttgcgttcgcctacgcctttgaccagcaatgtctttacatttttttcagcattgtcaggcggctgaggttgagtactggcatgtgggctggacactttcatattcatacgcgccactctctacaggatgtcatcctgagtgacgcgagagcctgggacaggtccatccggaatgatttggtaaagcaaatcgacccggccctcgattactgtggaggagtgtcgtcctcgaactggtccttcacgtacctgatctgagtgcggccatgaggcgctggcaggccatcttcaccaaggttgacgaagaccattttttccacggtgagaatgctgctgcgggtgatcttgttgcgcacttcacaggtcagggtgatggaggtacgaccgaacgcagtggcggtgatgcccagctcgatgatgtcgccctggcgtgaggcgctgacgaagttgatttcggagatgtacttggtcacgacgcgttggttgcccagttggacaatggcgtagatggccgcctcttcatcgatccagcgaagcaggctgccaccgaacagggtgccgttggggttgaggtcttcgggttttacccatttgcgggtgtggaagttcatgttcactccaaagcgtgttgccgaatgatgggcaacatcatggcagaggcccgccccaagctctacgcgccattgcctatcagccccatgagcgatcttcatatggccgacagaaaggcttgggaagtctggcgcacacggctataatcgcccccgcttcaaaacggtcatcttcggttgataccgttctcccgccacctgtccgaggggcgctgcagcaggttcaacctgtcaggctcggatggggcgttgtccggacaggtaccacctggcctgatactaaacgcacaacggcgcccattcgcacactacgaatggaggctcttcatgagcgctgtcaacacgcctgcagatttcaacgactacaaagtcgccgacatgtccctcgctgcctggggccgtcgcgaaacctttatcgccgaatccgaaatgccagccctgatgggtctgcgtcgcaagtacgccgccgagcagccgctcaaaggcgcgaagatcctcggctgcatccacatgactatccagactgccgtgctgatcgaaaccctggttgccctgggtgccgaagtgcgctggtcgtcctgcaacatcttctcgactcaagaccaggccgctgccgcaatcgctgccgccggtatcccggtattcgcctggaaaggcgagaccgaagaagagtacgagtggtgcctggagcaaaccatcctcaaagatggcgcgccttgggatgccaacatgatcctcgacgacggcggcgacctgaccgagctgctgcacaagaagtacccgcagatcctcgatcgcgtccacggcgtgaccgaagaaaccaccaccggcgtacaccgcctgctggacatgctggccaagggcgagctgaaaatcccggccatcaacgtcaacgactcggtgaccaagagcaagaacgacaacaagtacggctgccgtcatagcctgaacgatgccatcaagcgcggcaccgaccacctgctgtcgggcaagcaagccctggtgatcggctacggcgacgtgggcaagggttcgtcccagtccctgcgtcaggaaggcatgatcgtcaaggtttccgaagtcgacccgatctgcgccatgcaagcctgcatggacggttttgaagtggtttcgccgttcatcgacggcgtcaacgacggcaccgccgccagcatcgacaaggccctgctgggcaagatcgacctgatcgtcaccaccaccggtaacgtgaatgtctgcgacgccaacatgctcgccgcgctgaaaaaacgtgctgtggtctgcaacatcggtcacttcgacaatgaaatcgacaccgctttcatgcgcaagaactgggcatgggaagaagtgaagcctcaggtgcacaaggttcaccgcaccggcgcgggcgatttcgacccacagaacgacgactacctgatcctgctggctgaaggccgcctggttaacctgggcaacgctaccggccacccaagccgtatcatggatggctcgttcgccaaccaggttctggcccagatcttcctgttcggccagaagtacgccgacctgtcgccggcccagaaagccgagcgcctgaccgtggaagtactgccgaagaaactcgacgaagaagtggccctggaaatggtccgcggcttcggcggcgtggtgactcaactgaccaagacccaggccgactacatcggcgtgaccgtcgaaggtccgttcaagccgcacgcttaccgttactgataagcctaccacccgccctccttgtgagggcgggctttcaatgtgggagggggcttgcccccgatagcggaatgtcagttaacaaatatgtcgactgatacctcgtcatcgggggcaagccccctcccacattgacggtgtacatctcccggttgtatgagtttcaaagggtattaccatgtcccaagaccgtcgctacagcttcgagtttttcccgaccaagaccgatgctgggcatgaaaaactgatggcgactgccacacagttggccagctacaaccccgacttcttctcctgcacctacggtgccggcggctcgacccgtgatcgcacgatcaacaccgtgttgcagctggaaagccaagtcaaagttcccgccgctccgcatttgtcgtgcgtgggcgacagcaaggccgacctgcgcggcctgctgactcaatacaaggctgccggcatcaagcgcatcgtcgcactgcgtggcgacctgccgtccggcatgggcatggccagcggcgaactgcgctacgccaacgacctggtgagcttcatccgtgaagaaaccggcgaccacttccatatcgaagttgcggcttacccggagatgcatccacaagcgcgcaatttcgaagacgatctgcagaacttcgtgcgcaaggccaacgccggcgccgacagcgcaatcacccagtatttcttcaacgccgacagctacttctacttcgtcgagcgtgtacgagccatgggcgtgaacatccccatcgtgccgggcatcatgccgatcaccaactacagcaagctggcgcgcttctccgacgcctgcggcgccgagatcccacgctgggtgcgcaaacaactggaagcctatggcgacgacgtcaagagcatccaggcgttcggcgaacaggtcatcagcacaatgtgtgaagaattgttgcaaggtggcgcgccagggttgcacttctataccctgaaccaggctgaaccaagccttgcaatctggaacaacctcaagctgccacgctgaaggttgcccggcggtgccaaggccctcgtctacgagggcctttgtcgttttacatgcccacggaacccagcagtccatgaatacagtgcccacgccgtcccgcccacaactggtctacctggtcttcggcgccgagacctaccaccaggaagcggtgttcagcatcgccagtgcgctggctttcctgcaggcaaccccggaagccgccgtggatatccaggtattcagcgacaaccccgagccctatcgcctcttgccggtacgtgtacgcccgctggacgaagctacccgcaaacgctggagcgaaccccacggctatcacttccgtaccaagcatgtggtattgcgccaagtgctggaagaatcgccggtggccatgctgatcgacaccgataccttcttccatcattcaccgatggacctgttcgagcgcgtgcaacccggcaccctgctgtgcaatgccttctacagcaagtacggcgacaaccacgagagcattctctacaccgccttgcgccagcgcctgctggacatgggcgtggccgacgatgaaatgatgacgctcaactccggggtcatgggcctgacgcaacaggatgcgcacatcctcgaccgctccatcgccttgatggacgaattgttcccctatgcccaaggcgcgtacaccctcgaagaattctgcctgtcgatcgccgcctatcgcaccgtcaacgtgcgcgaatgcccggacctgatccaccactactggagtcgcaagcagctgtttcgcgccaaggtcaaggcctggatcgccaagcatgcggccgcgcccaccagcgcactggcgttggccgacactcgcaaggtgtccgcgcacctgccacgccctccccgcctgcagcgtcttctgtacaagctgatcacgctggtgctgcccaagcaccagcagcaattcatccgtgaaattctctacggctgctacgagcatgagaacgagttcgaccaggcgtgtggcccggtttggtgggacaaggcccggcagaacctggaagaacgccagaagcgcccgatcgacactcatcagttggagcactggtttgccaaccccgtggtacgcctgatcctcggcgagcgacgggcagcgatctacgaacacttgatgacctctccgggcaaatagcccggcccgcggatgcgcgtgccagagcttctctttagtgcgggagcgtcgtaacctcagggcatgcccgtcattctgaagttgttgactgccgccctcttcacttgcctgagcctcgccgcttatggcgagaagctgcgcattgtcaccgagccctgggcgccctacgtgtatgaggaccagggcagcatgcgggggctggactatgaaaccacggtgatcgtgttccagcgcctgggcgtggaggtggaatggcagttcctgccctggaagcgctgcctggccatgctcgaccaaggccatgccgatggcgcactggatatctttcacagccatgaacgcgacgccttgctgctgtaccccagcgagccactgtcggaagtggagttcacgctgttctacgccaatgagcgcccccaccccgtgcaaagcctcgaagacctgcgtggcctgaccgtcggcacatcgccgggctatctgtacggcgcagcgttcagcgactcccccctgttcagtcgtgaaccggcaccgagccatgaggccaacttcggcaaattgatgctgggacgcatcgacctggtgatcaccgaccgtcgcgtaggccagcatgtgatcaaggcgctgggcctggaaggcaaggtcagccaggcgccggccgtggtcagccgccaacagcaatttctcgcggtacgccgtagcgcaggcatggacctgctggtacagcgctttgccgccgagctcaaacgcttcaagcaagagccggcctatagcgccttgagtgccaaatatggtggaatccaagccattacggcctccggacgcaccgttgagcagcaggaaagcagcgcacagtgattgctctgttatactccggcctttccgccaggctcacgcccggccgctgaggtcttgaaaaaggcacccaacccgctacagcgcagctttcagcccgcgcgagccggtggagtgcccgccagacgcagcaggaccggacggggttgcgctcccctaagcgccattcacgcccggcaagattatccctttgggccaagccctaactaaaacaggattactcatgtcctttgcttccctcggtctctccgaggctttagtccgcgccatcgaggcagcgggctataccgagcctactccggtgcaacagcgggccattcccgccgtgttgcaaggtcgcgacctgatggttgcggctcagacaggtactggtaaaaccggcggtttcgccctcccgattctggagcggttgttccccaacggtcacccggacaaatcccagcgtcacggcccgcgccaaccgcgcgtactggtcctgaccccaacccgcgaactcgccgcccaggtgcatgacagcttcaagctgtatgcccgcgacctgaagttcgtcagcgcctgcatcttcggcggcgtcggcatgaacccacaggttcaggccatgtcccgcggcgtagacgtgctggtggcctgccccggtcgtttgctcgacctgtgcggccaaggcagcgtcgacttgtcccatgtggaaatcctcgtgctggacgaagccgaccgcatgctcgacatgggcttcgtccatgacgtgaaaaaggtcctcgcccgcctgccggccaaacgtcagaacctgttgttctcggccacgttctcccaggacatcaccgccctggccggcaagctgctgcacaacccggagcgcatcgaagtcacgccgccgaacaccacggtcgagcggatcgagcaacgcgtcttccgcctggccgccagccacaagcgtgcgctgctggctcacctgatcaccgcaggcgcctgggaacaggtgctggtgttcacccgcaccaagcacggcgccaaccgcctggccgagtacctggacaagcacggcctcaccgccgtcgccatccacggcaacaagagccagaacgcgcgcaccaaggccctggccgacttcaaggccggctcggtgcgcatcctggtggccaccgatatcgccgcccgcggcctggatatcgaccaactgccgcacgtggtcaacttcgagctgccgaacgttgatgaagactacgtacaccgtatcggccgtaccggccgtgccggtcgttcgggcgaggccatctccctggtcgcgccggacgaagaaaaactgctgaaaagcatcgagcgcatgaccaagcagaaaatcgccgatggcgacctgatgggcttcgatgccagcgccgtggaggccgagaagccagaagcgcgcgagcgtccggacgtacgcaacccacgcaacccacgcggtccgaagggcgatggcccgaacggcggcgggggtggcggtgggcgtcgcgacaagggcaaagacaagggcaaggaaaaatccgccaccagcggccgtggcgaacgcccagcccgtgagcagaagccccgtgaaggcaccccggcccgcgaacagcgccagccgagccagccgccacgcgccgctgccgaccgtgctccggacgagttcctggatgacgatgtggataacttcggcaaccgcgttgactacgtaccccaggccaagccggcccaaggccgtggccgtcgcccaggtgctccggcacagggtgcgggtgcgggcgctccacgtggcggccagccacagggcggccgtcagaatggccctcgcaacagcagcggcggcaccaccggtacgccgcctgccaagcgcaacggcccgcgcaatggcgcaccccgtgacggtcaggcccgccgtgaagactcgcgcagcaacaaccgccgcccggcccgtgacgaccagccacgcttgtccgaaccagccgtgcagaacccgcgcggtggcccggcgccgaagatcatccacaaggagtcgaaggcagatcgcttcccgacacccgagcagttggatcaactgccaggccgtcctcgtggtgaaaagccagcgctgctgacgcgcaatcgctgagttttatagccccatgaaaaagccccgcatctttcgatgcggggctttttttgtacaggcagaaattacttctgcttgacaccttccagcgagatgtccaggtccacagtctgcgaggacgggcctgggcccttgatgccgaagtcgttcaggttgacggtggtggtggcgttgaagccagcacgctcgccgccccatggatccttgccttcaccgttgaaggtggccttgaaggtcaccggtttggtcacgccgtggaaggtcaggtcgccagtcacatcagcagttttcgcgccagttggcttgactgcggtggacacgaacttggcgtcggcaaacttggcaacgtccaggaagtctttgctggcgatgtgcttgtcacgttctgcgtggttggaccacaggctggcggttttcacgtcgaccgcgattttgctggcctctggcttggcggcatcccagctgaaggtaccgtcccaatccttgaaggtaccgtgaatgtagctgtagcccaggtggctgattttccagtcgatgaaggcgtgctggccttctttgtcgatcttgtagtcagcagccatcacctggcctgcggacagcagggcagtaccgattgccagagcagcgagggtctttttcaacatgctttctattccttgtgagtcgaggttgaacatcaggctttgcgccccagcattcgcgtgagggtcgcatcacgatcgataaagtggtgtttcaacgcagccacgccgtgcaagccggcgaagaccaccagcacccaggccaggtacaggtgcaccaggcccgcgttatctgcctggtccggtagcccggaaaccacggcaggaatctcaaacagaccaaacaccgggataccgacaccgtctgcggtggaaatcaggtaaccggcgatcatcacggcaaacagcccgagataaaggaacgcgtggccaaaggccgcgccgatacgggtcatgcggctgtaactggccaacggtggcggcggcgggctcaccatgcgccagacaatacgtaccagcatgatggcgaacagcgtgatgccaatgctcttgtgcaggtctggcgcgtctttgcgccaggcgctgtagtagtcgagaccgaccatccacaaccccagggcgaacaagccaaacaccaccagggccacgccccagtgcaaaaccatgctgacccaaccatagcgggccggtgaattgcgtagctgcatgtacttaatcccgtaagagctgtgcccaagactagcgatttacctatcgaattaaagcggaaaatttcgctttgaaatatcgagaaatacgatcaagagattatgcacagtacgttaacaatggattaaggactattcctaagaaacgtgacagaccgtcccgcgtttactacgaattcagccgttatgggttgtgacacagccgcccattgcataggcttgcgcgattgtttcacctgcgccggccgcaggaccgcttcgaggagatcaccgatgggcttgaacaaccagtggatgcaacgcgaccttgccgtgctgtggcatccctgcacccagatgaaagaccaccagcaactgccgctgatcccgatcaagcgcggtgaaggcgtctggctggaagacttcgaaggcaagcgctacctcgacgccgtcagctcctggtgggtgaacgtgtttggccacgccaacccgcgcatcaaccagcgtatcaaggaccaggtcgaccaactcgaacacgtgatcctcgccggtttcagccaccagccggtgattgaactgtccgagcgcctggtggcgatgacgcccgagggcctgacccgttgcttctatgccgataacggctcgtcgtgcatcgaagttgcactgaaaatgagcttccactattggctcaaccgcggcctgccgaacaagaagcgcttcgtcaccctcaccaacagctaccacggcgaaaccattgccgcgatgtcggtgggcgacgtcccgctgtttaccgagacctacaaggcgctgttgctcgacaccattaaagtgccaagcccggactgctacctgcgccccgagggcatgagctgggaagaccactcgcgcacgatggcccaagtcatggaacagaccctggccgagcaccacgataccgtcgctgctgtgattatcgaaccgctgatccagggcgccggcggcatgcgcatgtaccactcggtttacctcaagctattgcgcgaagcctgtgaccgttacggcgtgcacctgatccacgacgaaatcgccgtgggcttcggccgtaccgggacgatgttcgcctgcgagcaggccggcatccgcccggacttcctgtgcctgtccaaggcgctcaccggcggttacctgccgttggccgccgtggtcaccaccgaagatgtctacagcgccttctacgacgactaccccaccttgcgcgccttcctgcattcccacagctacaccggcaacccgctggcgtgtgcggcggcactggcgacgctggatatctttgaagaagacaacgtcatcgagaacaacaaggccctggcccagcgcatggccactgccactgcacacctggtggaccatccacatgtctcggaagtgcgccagaccggcatggtgctggccatcgagatggtccaggacaaagccaccaagaccgcctacccgtggcaggagcgccgtggcttgaaagtgttcgagcatgccctggaacgtggcgcgctgttgcgaccgctgggcagtgtggtgtatttcctgccgccctatgtgattaccccggagcagatcgacttcctcgccgaagtcgccagcgaaggcatcgatatcgccaccaacagcaaggtcagcgtggcggtgccaaaagatttccacccaggcttccgtgatccgggctgattgcccgcactccttttccagagaacagaaatgagactgtcccgctttttcaccgacaccccgctgagcatcggcgatcacgaactgcccgaagcccaggcgcactacatcagccgcgtgctgcgcatgggcgaaggcgatgccgtgcaattgttcgacggttccggccaggagttcctgggcacactgctggaggtcggcaagaagcgcgtcaccgtgcaactgacggaaaacttcgcaggccaggccgaatccccgctgcacatccatctcggccagggcctgtcccggggcgagcgtatggactgggcgatccagaaagccaccgaactgggcgtcaacgccatcacaccgattttcagcgagcgctgcgaagtgcgcctcaaggacgaacgcgccgacaaacgcctgctgcactggcgccaggtggcgatcagcgcctgtgaacaatgcgggcgttcgacggtgccggtgatccacccaccgctgttgctggcggactggttgaagcagaccgaggcggatttgaagctggtgctgcacccggtggccgagccgatggtcagccatgccaagcctgccagcctggcgtttctgatcggccccgagggcgggctgaccgaccacgaagtcgaaaccgcccagggtgccggctaccacgccgcccgcctcggcccgcgggtgttgcgtaccgagacggcgccggtggtagcgctggccgtcgcccaacagctgtggggcgacttctagggtttactccaccggatcgctgatcggtttggcgatgatcgccttcaactcagtggtcatcgggaattccaggttcaagcccttgggcggaatcggctgttcaaaccagcgctggtaaatcccgttgatctctccgctgcggtacaggtctgcgagtgtctcgttgaccaccgccaggaactgcgggtcgtccttgcgcaccatgcagctgtagatttcccgcgattgctcctcgcccaccaccacccagttgtgcgggtccttggccttggcgcgttcgccgtagagcaacgcgtcgtccatgtagaacgccgtcgcgcggccggtctcaagcatcttgaaggcttcgccgtggtccttggcgctgatcacgaacatattggccttgtgctcggcgttgtagcgcttgaggaaacgttcgttggtggtgccggccgtggtcaccacgttcttgcctgcaaggtcggcgaaaccctggatgccgctgtcttttgccgtgagcaactgccccttcacatagataaacccgtaggaaaaccccacctgtttctgccgctcggcggtcaccccggtggagccgcattccaggtcgacggtgccgttctgcaccagcgggatacgggtctgggacgtcaccaggttgtacttcacgttgagcttggccaccccggttttgtgctggatgcgctcgacgatcttgttcgccagctccactgaatagcccatgggcttgccactgttatcgcccacgtaggaaaacggcaccgacgcatcgcgatagcccaaggtgatggacttggcgttggcaatcttgcccagcgtgccgtccagcggcgtttgattggcatgggcctgcgcgcccagcaaaagccccagggtgcagccggtcaacaggatctttttcattgttattctccgttggttttcgggttgtgagtcttcacgcagcgcggggcgtaaggccccgcatatcaatggagggcgtttgctggccgatcaattcagccagtaactggccgctgccacaggccagggtgaagccgagtgcgccgtggcccaggttcagccacaggttgcggtagacgcctgcgccgatcagcggcacaccggtcggagtggccgggcgcatgccggcccattccactgcgtgggcgtaatcccctgcaagcggaaacgtctccacggcctggcgtttcatcagcgccaggcgcttgggttcgacgcgggcgtcgaagccgacgatgtccaccatggccgcgacccgcagttgttcgccgatacgcgcgtagaccatcttgcggtcatagtcggtgatgctcacgttcggcgcctggtgccgggcgccaatcggcacgctgaggctgtagcccttgagcgggtacagcggcagcgacacgcccaactcggcgctgcgatacccggccgacagcaccagatgttcgaccggcatcacttcatcaccgacctcgatggcctgcaccgcgccctcggcatggcgaatcccggtgaccttgcgccctaacaagaaggtgcaacgtcccgatgcctccagccgcgccgccaagcgctggcagaaggcatgacaatcagcgacctcttcattcggcgtatagatcccgccgacaaatccaccgcccgccaacgccggttccaggcgcgcgcaatcagcggccgagagcacttgctgttgcaggatatcggtgaccttgctgcgggcatgctcaaaggagccggcattgcgaaaggtcaccagcttgccgttgcgccgccagtcgaaaccgtccaggtggtcgtcctcgcgccactgctgcaaggtgtcctggctcaggcaggccaagcgcagcaggtgcgcggcattgcgcttattcaccgagccacggcaagcgccgaggaacgccgccatccagcgccactgttgggggtcaaggcgcgggcgcagcttcagcggcgagtcaccgcgcagcaaccagccaatggcttgcagcggtacacctttatccgccagtggtgccacgtagcgataggacaattgcccgccgttggcgaagctggtttcactgcccagagtgtcacgcgcatcgatcaccgttacctcatgacctgcgcgcaccaacgcgtaggcgctggccagtccaatcaccccaccgccaataatgcacaccattcccgccgcccgtcgttgaatcaagaagcctccagcctaggggcaggtgacaggccaccgacaatgaataaagatgggctacctataaacaaaggttatggactcgccatgcgcttgcgtcatatcgaaatcttccaggccatccgccagaccggttcggtcagcgccgccgcgcaattgctgcatgtctcgcaaccggcggtgaccaaggtgttgcagcacgccgaattgcagctgggcttcccgctgttcctgcgggtgcgcggcaaattgctgcccaccccggaagcactggcgctggaacgcgaagtggagaaagtcaccgatagcctgcaaggcgtaagacgcttggccaaaagcctgcgccgtgaaccgggccagagtgtgcgcatcggcgcgatcccggcgctggcgctgtcgctgctaccgccggcgattctggagtggaaacgcgattacccggacatagcctgcgagctgtccagcgaccatagtcgcgagctggtgcagaagctgttgatgcgtgagattgatctggcgctgacgctcaatttttccggccatccggggttgaccacgcaggtgctggccaatggcgtgttggtggcattggcgtccaaaggctattggccgccagccgaactgagcaagcccttgccgttggctgacctggcgggcgcaccgctgatcggcctctccagcgccgacccgctggcggcgaagctcgacagctacctggaaaacgtcgacccaccgcccagggtaacgatctcggtgcaaacctattccctggctcgcgccatggtggaatccggggctggtttgacggtgatcgatcccttcaccgcgctgggtgcgtcaacggccaccacctgcatccgccccctcacaccgccgctgccaatcaccctgtacgccctgacccgcgccgacgaaccgccgccgcatatgttggccaatctgctggagatctttggccaccgtgccagggagcttctggagcggctataacacgtaatgcatgatcgccacaaaatgcagcaggctgccgccgatcacaaacaaatgccagatcccatgggaatgccgcaggcgatcctccaaggcaaaaaagatgatgccgacggtgtacaacaccccgcccgaggccagccagataaacccggccgtgcccaatgctgccagcagcggcttgaccgccaccaacacgatccagcccatcaccgcatagatcacgatcgacaggatgcgcgcctcggagcgcggcttgatctcctgcaagatcccgatcaccgccaacccccacacgatcccgaacagcgtccagccccatggcccgcgcagggtcaccaggcaaaacggcgtgtagctgccggcgatcaacaggtagatcgaaaagtgatcgaccttctgcatgatctcctttctgcgaccctgcacgctgtggtacacggtggacgcgctgtacagcaccatcaaggtaaagccatagatcgccacactgacgatcttccaggggctgccgtccaggctcgccaccaccaacatccacacggcgccaatacacgccgcgacagcaccgagcaaatggctccaggcgttgaatcgttccccgtggtacatgtgccgctgacctcctgtaaccgttaggactggctggcaagcgtccagccttgcgcataagagtgcaagcggcttatgacgttccggcgacgccgaagggttttgcgggcacaatcgaccgcattcgaacaagagccacggccatgctgatcgacgaagaattcaccctcaagaaactggaaatcttcctggcgttcatgcgcaccggcaacctggcccgcgccgccgccgaactgcaaaccagcaatgtgagcgtacaccgcgccatccactccctggaaaacgcgctgcgctgcccgctgttcaagcacgaagggcgcaacctcacgccgctggaaagcgcctacgtcctcgaagaacgtgcgcagaaactggtggccgacgtggtcgacagcgtacgcctgacccgcgaagccgccgggttctccgccgaacgcttcaaattgggctcgctgtattcgctgacagtgaagaccgtgccgcagctgatcatgggcctgaagatccgccgcagcgagctcaatatcgacctgatcctgggttccaacttcgacctgctctacaagctcaagaacatggaagtggatgcgatcctcatctcgctggacgagcacgccaacgacccggactgcgagcagattgcgctgttttccgacgacatcttcctcgccaccccggccgactcgcccttcgaccgcgaacagcaaatcgacctcgccgacgtgcgcgacgcaaccttcatcaccctcacccaagggttcgccacgcaccaggatggcaatcgcgtgttcaagcaggcggggttcgagccgaaggtggcgatgcaggtcaatgacatcttcacgctgctgagcatggtcagctcgggcgtgggttatgcgctgctgccgggtaggattgcggcggtgtatgagaaccgcgtgaagctcataccgctgcaacccaggtatcggttgcagcagcatatcggggtggtgttcttgaaggccaaggaaagggacccaaacctgctggcgttgctggcggagtgtcggatgtatgccaaccgccaggtgccagcctgacacaccgctatcgggggcaagccccctcccacacttgaaatgcgttccaaatgtgggagggggcttgcccccgatgaggccctgatagaccccttacccaaccaggccgcgcacaatgaaatacagcagcgaaggcccaagcaggcagcccagcccggtgtggaacgtcgccgtcagcgcgccatacggcaccaaccgccgatccgtcgccgccagccccgccgtcacaccgctgacggtgccggccaacccaccaaacaccatcgccgaacgcgggttgtccaagcccatccagcgcgccgcgaccggcgtaccgaccatgaccaggatcgccttgatcaagccggtggcaatcgacagcgccatcacatccgaggtcgcgccaatcgccgcgccggtcaccgggccgacgatgtaggtcacagcccctgcgccaatggtggtcatgctgatcgcatcgcgataaccaaacacccaggccatgctcgcaccaacgataaacggcaggatcgtgcccagcagcagcgcgatcacgccgatcatcccagccttgcgcgcctcggtggcttgcacttcgaacgccgtggcgacgatggcaaagtcgcgcagcattgccccacccatcaacccgatgccagagaacagcgccaggtccgccaggcctttctggccgccggtgatcgtaccgccgacccaggccaataccaggccgatgacgatggcaatcgccgagccatgaatgcgtccgaaggtcaggcgcttggacagcaccacggaaatccacatcaccacacccacgaaggcaaacgcggtgatcaggccgttgtgttccaggcctttttcgatgagatcccacatatcagcgacctcccactggagcaatcagcggctcttcatcgggcaacggttcgcccttgtgcgtgcggctgatcagggcaatcgtgcaaccacataccactaccgaaccgatcgcggcgagcaccgccaccgggccgccgtgcagggcggtgaccacgttttgttgcgcagccatcgccaccaccacggggatgtacatcgcgccccagaatcccacgcccatttcgcagtccttggtcatgccgccacgcttttgcatccacaggcgggcgcagatcaacaggatcatcgcgatccccaccccgcccacattggatttgacacccagcaacacgccgagcatgtcgcccatgatcacgcccgcaagcgtacagatcgccagtaatgccacaccgtagataatcattgttgttgtcctcaaagtgctcgatcgaaattgttgttgttgtgcttcgaaagccttgggcagtgctttatcggtggcggcggtcctcctcttgcagcaaggcctgcagggtgtccaggcgtgcgccttcacaggcgatcaccgtgccttgctcaaacacccgccgtgacaggccggtgagcactgcgcccggtggcagttcgatttgcaggcgcacgccgcgctcgtaggcgctttgcacggtgccgcgccagtcgacgacgcggcacatgttgaaggccaggtcgtcgcgcaattgctcggggttgtgaatcggccgtgcgcgggtgctgctcaggtaggtgatgcgcggcgccttgagcgtaccgaaggcttgggccagggcctgggccggttggtccaacaatgcgcaatgggatggcacgctgacggcgaggcgtttggcgatgccgttgcctttgatgcggtcggcgacgcgtttcatggcctggtcgctgccggcaatcacagtctggttatcggcattgatattggccagatacaccggggtttcagggctgtggacttcggccaacaggttttcgacggtggataactcggggccgatgatcgcggtcatgccgtagccctgtggataagcgttttgcatcagctcaccgcgcaggctgaccagcttgattgcctcgttgaagtccatcgcgccggcaatcaccgccgccgcgtaggcaccaatggacaggcctgcgacgtagtccggcgtgtgttgcagcaggcgggcgtgggccacgccggcgatcagcaggcaaagttgtacagcgcgggtattggccagggcctcagcagaatccaaggtgcgcacgtcttcacccaaggcatcgctggcttgttccaacacatcggccggcaacgcctggagcatgcccgagcgttgggcgccctgccctgggaacaccagaaggctgctcatgccacggcctgccagggatcaaggaccaaatgcgcaccgttggcggttttcaacagcacccgccgtgatggaccggcccattcgcgcaagacgacggcaccgaaaggcgtttgcagttgcatatccacagcgcacgcggcgttgtccaaggtggccaacaagtcgcgtgcatcgctgcgatccagcggatcgggtgtgcgcagaatcaggtccaggtcgctctgggcatgcagtgcttcaatgcccgttgccaactcaaaaccagcgctacccgtgacgccccaactcaatggcgccagcaccggccgcagttgatcaagggcttgcaatgccggtagatcccttgtcgaaaccacatcgcgcaacgcctccggcgcgacccgccgctgcacggctgccatcggcatcaacgcggcaaaccgctgctcgcgcaaacgcccacgcacacccaccgcgacaaagcccggcgtgacgatggcgcggcgcacgaccaccgtgccaaccgcatccttcgcccacgccggtgcgtcagcgggcaggtgcgccggggtcatgccccagagcaggtcgtgggcgttcaccattgctcccgcagcagttggcgcacatggctggaggcggcgcggttggacgcaccgaggcggctgctcaaatccggcgtgccgacatccttgatcgcactcaccaggcactcgttgacccgcgccacatcttgcgccgtgggctgttcgatctggctgaccgtcaaggtctcccacaacaggccgaggctggcatagctgtcgatgtcataggccatcggcggcacgctggcggccagggcttccagctcttcgacgctgcgcagggtcacccgcgccgccgaggccttgcccatggcgtgcaccatcacaccggggtcgcgcagggcgatcaggcgattggcctggtagccatgggcgaggaacgcgccggacatggctttgcccaccagcagcgcgatcaccgggtgcccggccaatcgggcacgggcatagctgtcggcggcggcagccagcgcctggtggatgccgagggcttcttcgcgccggccataggcctggctgggcacgtcgacaatggcaatgatcgggcgtttgtcgcctcgggcgatggcttcatcgacagccttcgccaaaccccaaccttcgagcaaaccgacttcgccattgcgtgcgcgggggaaacggttttgcgcgtcggtgaccacggcgataaagcgtacggcttgctcgcccagcaggccgtcggccactttcagggagttcggcaaaccctcaacgggcgttgcaccggcgctcaatgcgttgaaccactgcaaacctctcatgagcgttctccttgaaacagcgcgcgtaccgtcgccgggtcgagctgcggcgtagcatccagttcggccaggcgcgccaggtagtattcggattggcggctgcgttgctgggtgggcaggccctgttgcagcaatgcactgacggtctgttgaatctcggccacatcgtccgctacataacggtcggccaagccgctgttgaagcgctgctcgccgccggtgaggctccagatgaagggccggtcgcgggagtcatactcttcaagccccgcttcctgttcgatgacttgcggaccattcaagccaaggcgggcttcgcgggtgacgacaaggtaactgcacaaccccgcggcgatagacatgccgccaaagcaaccgacactgcccgccaccacgccgatcaccggctggtactggcgcaggtcgacaattgccgcatggatatccgcgatggccgccaggcccaggttggcttcctgcaagcgcacgccgccggtttccagcagcaacacagcgcgggttggaatacccttgcgattgtcttcggccgccagctccagagcgccggcgattttcgcgccgcccacctcgccaaggctgccgccctggaagttgccatcgatggcggcaatcaccaccggttttccaccaatgctgcccttggcgatcaccacaccgtcatcggcctggggcactacgccctggcggctcagccacggcgacatgacgcgctggaacgggtcgatcaattcgcggtaggagccggcgtccagcaaggccttggcacgctgccgagcgcccagttcaacgaagctgtgtttggcgagtaaatcagtcatgaccgacctcctcgaaaccctgctccaggcgcaagcgcaccacgccgggggtggcgccaaaatcgtggatatcaatcttcaacgccggcggggtctgctcttggaacatccgctcgaacagatgctgccagcgttgctcggcaccgttcaccgaggtctgcacctggatggtcagggtgcccggagtgcccggctccagcagcacttccaggtcgcccgagccgacgcagcccaccagtgcacggcctttcggtggctgcccggcggggaattcaaaggataaggtttccatcacaacgctccgtcgaggcggtcgataaacaggcaggcggccaacaggtcggcggcgccgccgggggaggcattcagggccagcagttgctggtccagctcatgcagttggcgacgaccggccagggttgcgctgccgccagcgtcgagcaccgcttgggcaccgtgctgcatggcttgaaggccctcggtgccggcgcggtaaagcacgcaagtgtcagccagctcggtcatgatcgcgagcaaggcatccaggcgcgcattctgttcgccggcatgctgcaggcggcttttgcgcagttgcggcaggcctcgttgtaccaccgaggggaagccgagctgcgcttcttcacgagccccgcgtgcgccgtagcgctgggcaacctgggcgccatggctcaggggttgcggagcgaagcggtcgttgagcagggccagttgggcggcggtcagcgtcacggcgcgtggttccagcgcggcggcggcggtgagcaaaccgagggcccagatcgcgccacgatgggtgttcaccccgttggtggtgataagcatcgcttgctcaccttcacggccaatgcgcccgagggcttcgcgcaggggcaagccgatttcaccgatctcaatcgccgcctcggccatttccttgaacatcggccatagcgacagcgccgaggcgtgcatcaggcccaggtgtaaatcgctgtgggcgccgttgccgcgccggtccaccagggcgggcttgggcgacaggtcggcttcatcgatcagcgcatcgacggccatgtcggccagttgatccgcaaggctgagttcatgcagtttgagggcgcgcatttaccagctcctgaatttggcgggcgggttgtacagaccaccggaccagtccaccaggtcagccacgctcttggcggccaacagttcacgagtggcgtcggtgcggcgaatccccaggtcttcaggtaaggcgatcaagccttcgcggcgcatgcgtgcagtgtccttggggttgtggcgcatgccgatggcggtgacgcctgcgacggcggcgatcatcgcctggcgctcttctagggagcgcgccttgtacaggtaggcgataccttcttcggtgagcaggtgggtgacgtcatcgccgtagatcatgatcggcgccaggggcatgccgcttttgcgtgcgacttccacggcgtcgagggtgtcgacgaaagtgggtttgccgccttcctggaaggtctcgaccatttgcaccacgagttttttaccgcgttccaacaaggcttcaggcgcatcgtcgtgacgcatgtccagccacgccggcgtaccatgacggcgaccgcgcgggtcatggcccatgttcggcgcgccaccaaacccggcaaggcggccacgggtcacggtggaggaatggccgtcgccgtcgacctgcagggtggcgccgataaacaagtccaccgcgtattgcccggcgagctggcagaacatgcggttggaacgcatcgagccgtcgcggccggtaaagaacacatccggccgtgcggcgatgtagttctccatgcccagttcggtgccgaagcaatgcacgctttcgacccagccgctttcaatcgcggggatcaacgtggggtgcgggttgagcgtccagttgcggcagatcttgcccttgaggccgagggattcgccgtaggtcggcaggatcaactcgatggcggcggtgttgaatccaatgccgtggttcagcgactgcacattgtgtttttcgtagatgccacggatcgccatcatcgccatcaacacatgcaccggcttgatgtggcgcgggtcgcgggtgaacagcggctcgatgtagaacggcttgtcggccactaccacgaagtccacccaactggcggggatgtcgacgcggggcaagtcggtaacgtcatccaccaactggttgacctgcacgatcacaatgccgtcgctgaacgcggcgggctcgatcagcgccggggtgtcttcggtgctggcaccggtgtagatgttgccggcgcggtcggccatgaaaccggcggagagcactacgttggggatcaggtccaccaccagccgcgcatagagttcgatgtaggtgtggatcgcgccgatttccagcaggccgtcttcgagcaactggctgatgcgcagggattgggtgccggcaaaggagaaatcgagcttgcgggcgatgcctttttcaaacaggtccaggtgctcggagcggccgacactgggcatgatcatgtgcaaatcgtggagcttggccgggtcggccttggccagggagcgcgagaggaaatcggcctgtttctggttgttgccttccagcaccacgcggtcgccggggaggatcaacgcctcaagcgcctcgacgatcctgtcgctgggcagcaccgcaccgtctgcgtactgtttgaccagcccgagccgccgctgcttctcgtcgcgccgccgcgtccagcgtgagtcgggggttattgttgttgtcatggtcgctccacgggtttgctgtcgtggggcttaccttaggagtgattgagggggccatcaatcaagctgggcgctggactgttacgcctgggttaatgatgcatcaataaacacgggcgttcaggtgcggtgccattcggtgtggtggaaccatacggtcctgaacaacgccaaggcggcaaaaacgtgcagccccaacacagccgcccaactccactcccacaggcctgatagcgcctgggcgtaaaccggcaacagcagcaagagcagcgccaccagcgcgcagccgcccagttgctcccagtttctcaagcgactgggacgggaggctatggcgtaacccagcagtgcacccaggcacaccaccagcaggctcagcaagtcatgctcgtcgacgggcggccagcccagcaggttgagtggcaagcacaccgcgaacacggtgaacgcgcaaatcgcgacgtacacgaaggcgtattcaagcgcatccagcagacgatcacggataaaccctcgggcctgtttgtcttcttccggggtaggtcctttggatatcgccaccgccagcagacccgagccaagaccgcccagggtcatgaccacaaagttgctcacgacgcccctgattgccttatcggcaccgatcagcttgaggctttccaggtacaccaggataaacaccgcgcctgcggtggtaatcatgaacccccacagcttcccacgattggactgcacgttcatggtcaccgctgccgtgagcaccagcacgccaaaccacatcagaagcgtgccggtaaaacggttgaggtcgtacagccaggcaaacccatccaaaagccacattgcgtcgatacttctgtcgaaaaactcccttggctatcggcagtggggtggggatctttacgaggggaaaggaacaagtgatccgcaacccgtcacaattcaccaggacgcctctcctacattttgatcgagtcatgcccactgatagccagccaacaggccctccacgtttccctgcaacgtggtcgtgctgtcaatcaactgggctaagagcggctcgtcctcatccatatacccttcgtactccgccaggttccgacgctcatgacacagcgccaacaacctcacctgcaccttgccggcacctgtggtgtgaaccaggcattgaaacaccagatagcgtttgtccgagcgatacccctgcaagcgcaaggccgtgagggcgatagcacgagccgcgttgtaagccaggtcgaaacgactggcgaatgataactgcggattgccggcatccctcagccgatccctggctgaacgcatcagcccatcacactctttgcgatccggcggctcagccttcaaaccgccgctacgttgcagattctccaggtttgccttgctgtccatccgtggattccagggggttgcccccaatcagattgatcttgtcctgctgcacgacccgctgcacaaaactgttcccgacattccatttgccgatccagtcttcaggggtgtaaagcgtcgggttgatggtgcgccccagttgctcttccagtggcatgagctgctccatgacttcactgtagttgaggctttcgccgatcaacatgagatctatgtcactggatgagtgcgcctcgcccttggcgatggaaccgtagacaaaggcccaggttatctgctcggcgaaaggtgccagtgcatcgcgcaagggctcgtccagactcagggtcttgcgcacgatagctaacaattccgagtagatagggcattggggattggcttggtaatgggtctggttgccctggcgcgtcatgttcaagatgcccgccaactgcaaccgttcaagctcacgggtgagactgcctttgcccacttgggcccagcgtgcaatttcattggtgaagaagctttggtcgggcttgccgaaaagcaggcccagcactttttgctgggtgacagtgaagagcgcagtgctgagcggcaaggtgtgcatggcagcggccaaagagtcccaaaaagggaacgataggtccctttttgggaacgatcaagttttaagcgactggagaaggggaaatctgttccaaggcacggtccaccagcaactgccccagctccgccatctgctggatgccgagcatgattgcgcgctgggaggtgtccaggtcgaaggcgaggttgcaagtgagtgcgttgagggaggacagggtttcgctggcgttgaccagcagggtttcggtgtcttggtgagggtttacggtgaagaggggcggattgggggtaggtttgatcatgatctacaactccgatatgtgatggagactgccctcttccgcttgcacgcgaattaaggtggcagctgtgcgcaggtgtgcaagaccgggcatatcggaccccggcagaccccgagggatctcccacgcacagccgccataacgagtacagcaggcataaaaaacgcccgttgaatggctatgggcgtttgtgcgccgacatgtaaccggacttgcacgtccgtgtcaccgttttttgcgatgacggggcgaagactaggcgcgctgacggcatgcgacaagttcatgcacagcccaaaatcttgcaggaaaaatccgagagcctgccgacctataacctcatgtctagtctcacagcccctaaaccttcgagcgggtaactacggtactcataaacctcacctcgaacagtgaggcggataaggcccccctgccgggtaacttgaacatccggctctttggttttcagaaaagggtgtgccgacaccaatgtcgtgagtatttcccgatcattccccagatccttgtggacgtagtacaggtaggaaaagcccaccgtagcgccaccctgattgtttcgcgcaccgtaaatggagctcccgttattcagagaatacttgagcacaacctcatccaattccggtggacctgggctcatcaaccaaccaacacccaagtacccgagacacaccaccagcagcccgttgaacaagccctggaccggccaattaatacccttgagctgtggcatattcgataccctccttgatccaatgctggtcgctgtgatcatcgccatacggcgcatcgccccaccagtctccgaactccgcccgagaagtccctgctgccttttgcgccgcaccagccgctctcaacagcacactctccggaatacccagcacagtgccggtgacgccgtagttgaagttaccgaacgcctcatactcgcgacttttctgtttgtaatcccaagggccacgccctctgacctgcgagtaaaaccacgaataggcgaaggccgaaccaggcttcaaatgcatcctgcggttgttggccaaggcgatattgtcttgcagcgaaacgcccgaaggtatgggagggacggccatttgcgaatccttgctgatggggttgagcgataaaaactagcactcaaacatcagtaaaaatacgaaggtgagacttacagaaatttcagacacgctatcagtccgagccctacctacgattgtcgtcccgacaagcaacaaagaatgttctgacagcgctttcaggttgttgctcggaacctgtgtctctagcctttccgctccgaatcgttccgcggacagacatcatgaagccgaccgttaaaaccgatgcaaggccattgcagagcgtgatgtatcacatcacaatcgtgccatgatcgtcagctggaaacacaaaggtctcagggtcttctatgagacaggctcgaccagtggaatcaacgcaaatcatgcaaagcgcttacgccgcgttctgttcattctggacaaagccgaacgtccagatgcactgaacttgcctggttggcgtttccatcggttgaatggcgacctgatcgactattggtctgtcagcattagtggtaactggcgcatcatttttcggatgttcgacgaccaagtcgaactggttgattatcttgattaccactgagtagaggtatcgatatgggcatgcacaacccccctcacccaggtgaaatcctgcttgaagatgtaatccctgccctgaacatcaccatcaccgaaatggcccggcgcctgggattcgcccgtgagacattttcgaggattttgcatgggcgtgcgcctgtcagtcctgacttggcggtgcggcttgagcgggcaggtgtgagcactgggcagttatggctgtcgatgcagagtgcctacgacttgtggcaggccgagcatcgggagcagccggtgattgagcggtttgcgcggattgattgaggtctacggattgtgggaggggcggtacgacgattcgacttgctcccgatagcagtgggtcagccaccagatgcagtgactgacagattgcaatcgggggcaagtcgaatcgtcgcaccgcccctcccacattttgatattcactgggattgagaatgagggatcaggccaggccggactctaccagcagtgcctccagcccaagcaaatccggcaccttcgccacatgctcgcccacctgcaccgccgccagttccagcgggcacagcggcacgtccacataactcaactcactgtcgagcttgtacgacctgggaatgccctggatcaccagcgcaataaacttcaacgtcggccgcccgcccaatgcattcaacaccacgatgcgcgagcgttcgccggtcacgctcgcttcgccgcacaccgcttcaaagctgatcagcgggatttgccggtcgcgccaggtcacttgccgcaggtaccacggcggagaatcgctggccggttcgccgcgctggaagtcgatcaactcggcgatggcgacattgggcagcaccaggtggcggtcggccaggggcagcagcaggccggtgagttggctggtgcggtggtcaagcatgggacttgctccagtaggcgatgctttcgagcagcaccgattcctggtacggcttgcccaggtagtcgttgacgccaatggccatggcgcggtcgcggtgtttctggccggtgcgcgaggtgatcatgatgatcggcagacgcatcagccgggggtcgttgcgcacctgggtcgccacttcgaagccgtccatgcgcggcatttcgatgtcgagcagcatcaggtccggggtgtgttcttcaagcaccgccagcgcgtcgatgccgtctttggcggtgagcacgttcatgccgttgcgctccagcaggcggctggtgactttgcgcacggtgaccgagtcgtccaccaccagcaccagcaacgggcgttttttcagcgggtcgttgaggatcagtggcgcatccaccgactgagccggcaatgccggctgccgcgcacggatatgcgccagcaagtcgatgatcaacaccacacgaccatcgcccaggatcgtcgcgccggacagcccctgcacaccggcaaactgcggccccaggcccttgaccacaatctcccgcgtaccggccatggcgtccacatggatggccacatgccgctcattgcactgcaccagcagtaccggcaccggttgatactgccccagcagtttcgggcggctgacgctgtgcagcaggtcgcccaggtagaacagctcgtaacgctggccggcgtattcataacacggcggatcttgctggtaatgcccggccagctcatggggcagtacccgcaccaggccttcgatggtattgagcgggatcgcgtattggtcgtccgcgcactgcaccatcagcgcccggttgaccgacacggtgaacggcaagcgaatgcggaaatgcacaccctcgcccggggtcgaatcaatgaccatcgagccaccgagctggcgcacttcttcatgcaccacgtccatgcccacgccgcgcccggaaatctgcgtgatcttttcagcagtggagaagcccggctgcaggatgaactgcaacacgtcacggtcgctgatctcctgattcggggccagcaggccacgcttgatcgccttacgccgcacggcttccaacggcacgccggcgccgtcgtcgcgcatgtcgaagacgatatcgccgccttcgtgggtcaggtccagggtgatgcggcctttctccggtttgccagccagcagccgtgcatcgcgggactccaggccgtggtcaacggcattgcgcagcatgtgttccaacggcgccgccatgcgctccagcacgttgcggtccatctcgccttcggcattgccgacgatgaattccacgtccttgcccagctcgcccgccacctggcgcacgatacgcttgaggcgtggcagcatgcgttcgaacggcaccatgcgcgtacgcatcaggccttcctgcaactcggtattgatgcgcgcctgttgctgcagcaggccgtgggcgtcctcgttgcggcgctccagggtgtccttgaggtcgagcaggtcggaagcggattcggacaatgcgcgggacagttgctgcaactgcgaatggcggtccatctccagcgggtcgaactcttcgtagcccaggcgctcggcctcggcctgctggcggctgaggatacggccctgggtttcggtgtcgagacgccgcagttggtcacgcatgcgttcgagggtggtttccacttccgtaagagcgatgcgtgcgtcgttgacctgctgctcgatgcggccacggaagatcgaggtttctccggccaggttgaccagatcatccagcagctcggcggagatcttcaccatgtcggcagtcgggtccacgacggcctccgccttgcccgcaggcaacgccaccggcgtcaccggctcctggctggggtgtaccaggcttttgatgcgctcgatgagcttgtccaccgagccgaccggcaagccgtccgccacggcgtcgatcatctgtgccagacggtcgtggcaaccttgcagcaacgcaaacagctcaggcgacggcgcgagcaggccggcagacaggccttcgtagagaaattccagttcgtgggccaggtcgccaatgggcgcaatctcgaccatgcgcgcgccgcccttgagcgtatgcaggtcacgcagcagggtctccacctcctggcgattgccgggctcggcctgccagcgcgacagcgccgcactggaactgtcgagaatgtcggccgcctcttcgaggaagatatccagcagttcagggtcggcgcccgacgccgctggcgcagcggccggtgcggcaggcgcgttgccttggcgcagcgcccgcaccttggcgatcagctctgcgttgtcgctcaagggttggtgatgctgcagctcttcaagctgcaaggcgaggcgctcatggctggccatcaacacctgggacaattcggcggagtaactgtagcgacggtccaccaacccttcgtacaggcattccaactcatgggccaggtcgccaatcgggccgatttcggccatgcgcgccccccctttgagggtgtgcagatcgcgctgcaatgacgacaacggcgcagcactgtcgggctctagcagccagcgcttgagcgactggccagcgctgtcgaggatgtccacggcttcttcgagaaagatctcgacgatctcgtcgtccatcgtgatttcgtgatccaactgctgggtagcggcgcccagttcggcaatgctcagcactcggctgccgtcacttttgatcaagccggtggcggacgggtcgagggcttcatccagcagttcgcgcaaggcctcgacccgcgccggcgccgggctgatttcctggccggcggccagttggtcgagcatgctgatcagcgcttcatgggcctgttcagcctcgtggaaaaaccgctcgctcaccgccaggctgctttcttctaccgccccgtacaaatccagcaaggcttcgcagagttcgtcgatggcgtgcagatccgcgacgtgcgcgccttcgcccagggtggtcagttcatccagcagtgccgtcagctcctggcgctcgccggggtgctgctgccagcggcgcagcaggctctcggcgtcgagcaggatgtccatgccttgggccaggaagttggcgatcagctgcggatcgcgcttgatgcgcacgtcgagcagcgcttcaagctgctgatccagcaggctttgcgtgcgcttgatcaggtcctctgcaccgttgatcggcgccaagggatcactgtccaggtcgcgcagcccacgctggaacaggccttcggcttccagcagcaattccacttcatccaggtccagcggcaggcggtgggccttgtattcgcgggtcaggtggtccagcgggcgtgccagttcggcgatgggcagcacgccggccatgtaggcgctgcccttgagggtgtgcagggcacgttgcagttcatcgctgacttgcagcggcacatgctcggcggcctgttgcaggaagtggttgaggctgtccaggtggctctgggcttcgttgcggaagatctccagcaacatcggatcatggggttcggcggccggcacagatgtaccactggccaaggtatgcgcgcgggcggccagggcgtcgacttcatcgcgttggcgctggtcgtcgatggcaaagtcagcaatcaattccggcagcagggccaccgcttcatccagcacctgctgcacctcggggccgagcaccacgctgcgctccagcacacggttgagcaggttttccatggcccaggccagctcggccaagaccagggcgcgcaccatacggccgctgcccttgagggtgtggaaagcgcggcgcatttcgccctgggcggttttgtccgcgctgttgggcaggtaacggtgcagcacttcgaggacttcatcggtttcttcgaggaagacttcgcgcagttcgtcgtcgatgggctcctcgtcggcgggcggcggcagcaggctgccggggcgttgcagggccggcgggttgaggcgcgacgtcggactggccagggcgtcgaattgggattggctcggcgcgagttcggccggcagtgcgccatccggtgcaaccaacgcctggcgccagggtttctcggcaggcaggtaacccagcgccgccaagccttgagtggccagctccagcacgcgctcacctgcagcatcggggtcctggagcatgcgttcgaggtagtactccaggctgctgatcacgtcggcgaaatgcgccaattgcatctcggacggtggcgcgtcgctgcccatcaactgttcgtcgacgtaatccgtgcacccgtgcatcaggctcgctgcgcgaggcaacgggatcatcgccagggcaccgcgcacctggctcagcagctcgggcagggactccaggcgctgacggtcccaatcggcttcgatgcagtcgatcaccagttccttggcttgcttgaggcactggcaggactcgcgaatcaccaattggtgaatctgggtcaggtcggtggtgggcaggcggctttcttcgcggctctccggctcgacggtgccaaccatgccggccagcgtggcttcgacgtagagcaaggcgccggcgacatccatcagcaccgcgtcgttgggctcgcgttggccctgagccaggctcagcaccacggcgagttggtcgatgatgactttgcgcggctggccgaagcccagcaccgccagggtgtcggcgatctgccgcagcggtgcgagcagtgcatccaggtcgctggtgtgttgacggtcgctgcgcacgaacaagtcgaggcgctccttgactcgtaccagttcttcgcacaaggcaccgagtaccgaccccatcgcattgcggtccggcccggccaggcgtgcgcgctcggcgtcgaccaccgcgctgtcgggcagggcttcatccaggccgtagcgttccttcaagctttgcatgcgcggcgtcggccgagtgaccttggcgacgtaaaacaacaggctcttgagcagttcatccggcgccggctggttgatcccgccgatgccttgggccagcaggcgcttgagctgtttatcactggccttgagcaggctgcgcagcgccgggctgttggcgatcacaccggtgagcataccttcgaccagcgccgaggtgacttgccacagcggcaacaacggcgcgccctggcacaaggcttcgaggcgcgcgaacacccgcgccatgtcttccaggttgctggggccgtggtcttcgcgcagcaacccggccaaggcctgttgcagcagttggtgccactggcgcagttgctctttcaggtcgggtacggcgcgttgggccagggcttcgtcgggcaacggggcgatcgtcaacagttgcggactgaacaggctggtctccgacagcaggctttcaccgcgcgcgctgcgtaggtcgttgagcaatggcaacaccaccagcggcaggtcacgccgggcgctgtgcacacggtccagatacaacggcaattggttgagggcctgttgcagcaggcggatgctttcgtcgcgctggctcacgcggtcggcttgcagcgccagggccagtgcttcgatttcctcggccagcagggccgcgccatagaactcgaccatttgcagcgcgccatgcgcttgatggacacacgccaggcactcgccgatggcatcgccgtcggaggtttcgacgtacgcatcgagcgccgaacgggcctgtttcagggtttcggcaatgtcgcccttgacccattcgagggccacgtagtcgtgccgatcaaccataactgctccgcttagaattcatgggttgctggtggtgcgaggtctcaagacagatagagatcaaatgtgggagggggcttgcccccgatggcggtgcatcagtcaaagattgggtgactgacccactgctatcgggggcaagccccctcccacattgacactgcatttcaatcatcaacctgctttgcgggcgggagggtgaaccccgacaccgaccgtcgcaactggctggccatcttcgccaaattgccgatgctttcggcggtcgccgtggagcccgacgaggtctgggtggtgatctgctggatcacgttcatggtcagggagatctgccccgccgaactcgtctgctgctgcgccgcgttggagatgctctggatcagcgccgccagggttttcgacacgccctcgatctcttccagcgccaccccggcatcctgggccagccgtgcgccgcgcaccacttcggtggtggtctgctccatggaaatcaccgcttcgttggtgtcggcctggatcgcccgcaccagggtttcaatctgccgggtcgccgccgacgagcgctcggccaggcgctgcacttcatcggccaccaccgcaaagccgcgcccggcatccccggccatgctcgcctggatcgccgcgttgagggcgaggatgttggtctggtcggcaatgtcgtcgatcaggctgacgatgtcgccaatctcctgggacgactcgcccaggcgtttgatgcgcttagcggtgtcctggatctgttcgcgaatgttgtccatgccgtggatggtgttgtgcaccacctcgttgcccttgttggcaatttccaccgagcgctccgccaccgccgaggattcggcggcgttggccgatacctggtcgatggactgggccatctggttgatcgccgttgaggcctcggcgatctgctgggcctggtgctccgaggcctgggccaggtgcatggcagtggcctgggtgtcctgcactgcaccagcgacttgcccggcggtgaggttgatggtggcgaccaggtcgcgcaactggtcgacggaatagttgatggagtcggcgatggtgccggtgaagtcttcggtcaccgaggcggtcacggtgaggtcgccgtcggccaggtcttcgatttcatccagcaggcgcatgatcgcgttctgattgcgctcgttcttctcggcggtttcatgcagttggcggttggtctcgcgcaccatcaccaggccgatcaggatgatcgaggtcagcgccagcaggcccagcacatagccgccgatggtgtcgaagctgcgcccgccggccaggttttcgaaaccggtggccaggtgcgaagcttcatcgagcagggtttgcgacaggttgaagatattgctcgccgaggcacggacctggaacagttgcggcgaggtttcgaggatttcatccacggagcctgagacaaactcgaacagctcggcgatttccgccagccgcgcgcgggcatcgcggtcttcgacctgggtaatgcgcaggccggggttgccctggagcatgccgttgagcacctggccgaagcggttggcatcgcggccgaaggcgtcggcggcctgcacggcggtttcgtcgccggccagtacggtgttcaccgcccccaggatacgctcggccagcaacgactggcgctgggccagggcgacctggctggctggggcgccgcgctgcagcagaatgtcgacgaccttttccgactccacctgcaactgcggaacggtttccgccagcgtcgccgcgacctggtgcaaggacagcacggtctgttcgctggcgaggatcgcgtcggtgtttttcagcagcgcttcccagtcggtctgcaccgcacgcatttcagcacgtaccgcactgggcgcggccggcaggccggtttccgggtcaccttttttcaggtagccccagcgctgggcgaagtcgttgcgcgcatcccccagcagcttgaacgcggcggccttgccggcagcggcttcggtggcgttcttggcgatgcgctgggacagcacgcgcagctcaccggcgtggccgatgtactgcttgtcataggtggactgggtgttgaggtacgcgaagttggcgaacagcaacatgatgaacacgatcagtgcaatgaacagcacgatgatctgggagcggctgcgtgacgcggcctggggttttggcggggtaacggtggtcatgcggcaacatccatgaagccaggggcctgggccagggcgaaggggctgaagacctgccactgcgggttgccctcgaaacgcccctggatatacggtgcaccgggagcggcactcgccagcagtgcgtcttgtgcgaaatgctgcatccccatcacctcgtccaccagcagcccgacaaacaaatcgttgaattccaccaccaatacgcgccgctgtttgcgcgccttggacaactcaaggccgaggaacccgcccaggtccatcaccggcaacaagcgcccacgcaggttagccacacccttgacccaggccttgaccccgggcatcagcgtgcagcgcggttcatgcaggacttcggcaacttcgcccatgggcgccacataccagtgctgccccaggcgaaagccgatcccgctccagcgttgcaggcgggtttcctgggacggcaggtcggcggccaacaggcgacagcggcggtcgatgtccagcagcagctcaaaggcggtttgcgactcggtcatgatggcgaaccgtcagccggccagcaccttgttcagggtggcgatcagggtttcttcatccaccggtttggtcaggtagtccttggcgccctggcgagcgccccagatcttgtcggtttcctggtccttggtggtgatgatgatgatcgggatgccgttggtttccggctccttggacagctggcgggtggcctggaagccattgaggcccggcatcacgatgtccatcagcacggcgtcgggcttttcctggcgggccagggccacaccatccgcaccgttttcggccttgaggacctggtggccatgcttttccagcatgccggtcagtttgtacatttcggtcggcgaatcgtcgacgatcagaacacgtgccatggttttccccactacataggtggacgccggcccttgtgaggcggcgtcagtgtgcttgttctactacggcgaaccccggcacgtaggccttgatcgcgcccagcagttcttccttgctgaaaggcttggtcaaaaactgatcgacacccacgatgcgccccttggccttgtcgaacaagccgtccttggacgacagcatgatcaccgggatcgacttgaacgccgggttgttcttcaccagcgcgcaggtctgatagccatccaggcgcggcatcatgatgtcgacaaaaataatgtgcgggtgatgatccacgatccgggccagggcgtcgaaaccgtcgatggccgtgatgacatcgcaccccgtgttcttcaacaaggtctcggcggtgcggcggatcgtcttcgaatcgtcgatcaccatcactctcaaggcgttggaatgctgttccatatctgctctgccatcgccacagcgaatcggttttcggtgtgtactgcctgatgttgcacaggatgaacgccacaagcctcggaattcaagggctgctgcgccgtggcagtctttttagcacagtctccgggcgcaatctatcgagcaaccggccaggtggtttttccttgacccacaacagccgcagcgccactctgacgccacttttatgcgccctaatttgctagaggaaatcccccatgagcgttcgcgtcggcattgtcatggaccctatcgccagcatttcctataaaaaggacagctcgctggccatgctcctggccgcccaggcccgcggctggacgttgttctatatggaacagcgcgatctttaccagggcgacggcgaggctcgcgcacgcatgcgtccgctgcaggtgtttgccaacccgcagaagtggttcgagctgcaagacgaagtcgacagcccgctgagcgatctggacgtgatcctgatgcgcaaggacccgccgttcgacatggagttcgtctactccacctacctgctggagcaggccgagcgcgccggcgtgctgatcgtcaacaagccgcagagcctgcgcgactgcaacgaaaagctgtttgccaccctgttcccacagtgcacgccgccgaccgtggtcagccgccgcgccgacgtgctgcgtgaattcgccgccaaacatggcgatgtgatcctcaagccgctggacggcatgggcggcacctcgatcttccgtcaccgcgcaggcgacccgaacctgtcggtgatcctggaaaccctgaccgccctgggcacccaacagatcatgggccaggcgtacctgcctgcgatcaaggacggcgacaagcgcatcctgatgattgacggcgagccggtggattactgcctggcgcgcatcccggccgccggcgagacccgtggcaacctggcagccggtggtcggggtgaagcccgccctctgtcggacaaggaccgttggattgccgcccaggttggcccgaccctgcgcgaaaaaggcctgctgttcgtgggactggatgtgatcggcgagaacctcaccgaaatcaacgtcaccagccccacctgcattcgcgagatcgacaacgcatttggcacgaacatcggcgaaatgttgatggccgccattgagcgcaagctgcaagccaagtgatatagaacagccggacacgcaccaacattgcgctatcatgccccacctgtgaaacgcgcgatgttggtttttttgtcatgacactcccgtccgaactgccccccgaactctcccacagcggcgtgcgcccggctgatcggctcggatttaccctgttcctggcggcgttgattcacttggccctgatcctcggcgtgggctttaccatggtcgaacccaagcaaatcacccagaccctagaaatcaccctcgccacgttcaagagcgaaaagaagcccgagaaggccgacttcctcgcccaggacaaccagcagggcagcggcaccctcgacaagaaagccgtgcccaagaccaccgaagtcgcgccgttccaggacaataaggtcaacaaagtcaccccgccaccggcgcccaagccggaggtcaagcaggcagcgcccaagccagccgtgaccaccatcgcccccaaaccgcagaaagccccggcccaacgcgaaaaaaccaagaccgaacccacgcccgagcccgtaaaaccggcgccgactttcgacagctcgaccctgtccgacgaaatctccagcctcgaagccgaactggccaatgaacagcagctgtacgccaagcgcccgcgcatctaccggctgaatgccgcctcgaccatgcgcgacaaaggcgcctggtataaggacgaatggcgcaagaaggtcgagcgtatcggcaacctcaattacccggaggaagcccgacgccagcagatttacggaaatttgcgtctattggtgtcaatcaaccgcgacggcacattgtatgaagtgcaggtgctggaatcgtccggccagccgctgctggaccaggccgcccagcgtatcgtgcgcctggccgcgccctttgcgccgttcagcggcgacttgaacgacgtcgaccgcctggaaatcatccgcacctggaaatttgccaagggcgatcggctgtcgagcaattgatgacaattgccgcctgtggcacatcaccagcttgtcagttcgcccctcccccgccacactagcggacatgaaaaatgtcagcccgacctacctcaagcaccacttcctgatcgccatgccccatatggccgacccgaactttgcgcaaaccttgacctacatcgtcgagcacaccgccaagggtgcgatggggttggtagttaaccgcccgcaggcgctgaatttggcggatatccttgagcaactgcgccccgagatcgacccgccggcccgttgccagggcgtgccgatctatattggtgggccggtgcagaccgatcgcggctttgtgctgcaccccaccgggccgaagttccaggccacggtcgatcttgacggcgtatcgctgtccacttcccaggacgtgttgttcgccatcgccgatggcgtgggccctgatcaaagcgtgatcaccctcggctacgcgggctgggaagccggccaactggaggcagaactggccagcaatgcctggctgacctgcccgttcgacgccgacatcctgttcaacaccgtcagcgaactgcgcctggacgcagcggcggcgacgctaggaatcaacctcaacctgctgaccagccaggcggggcacgcctgatggctttgcgtctgatccttggctttgactacggcaccaaacagatcggcgtagcggtcggccaggtgatcaccggccaggcccgcgagttgtgtaccttgaaagcccagaatggcgtgccggactggaaccaggtcgaggccctcataaaagagtggaagcccgacgcggtcgtggtcgggctacccctgaacatggacggcacccccagcgacatgtgcctgcgcgccgaaaaattcgcccgccgactcaatggccgctacaacctgcccttctatacccacgacgaacgcctcaccacctttgaagccaagggcgagcgccgtgaccgtggcggacaaaagggcagctaccgcgacaacccggtagacgccatcgccgccgccctgctgttgcagggctggctggatgaaaacaccgctttatttgaatcctgactgacgcggcttgccgcgtctttttacgtttgagcccggtccttgcctgcgcgaggcctagaaggagcccccatgagcctgccgaaccccgccgaactgatcagccagatggccaccagcctcacggcccatctgcaacaccgcaacatcagcgagccacgcttcatcggcattcgcaccggcggtgtgtgggtggcccaggcgctgctggaagcactgggcagcgagtcgcccctgggcaccttggacgtgtccttctaccgcgacgacttcagccagaacggcctgcacccgcaagtgcgcccgtcggccctgccgttcgagatcgaaggccagcacctggtgctgatcgacgacgtattgatgagcggccgcaccatccgcgccgccatgaacgaactgttcgactacggccgcccggccagcgtgaccctggtgtgcctgctggacctggacgccggcgaattgccgatcagcccggacgtagtcggcgccaccctgtcgcttgaagcccatcaacgggtaaaattgctcggtcccacgccgctcgtactcgaactgcaagacctcgccctttaaaccgccttgtaaagagtccccgcgatgacgcctctagatgccaagcgcccgctgcagctcaatgctcagggccagttgcaacacttcttgtccctcgacggtttgccccgcgaactgctcaccgaaatcctcgacaccgccgactcgtttctcgaagtcggtggccgggcggtgaagaaggtcccgctgttgcgcggcaagaccatctgcaacgtgttcttcgagaactccacccgcacccgcaccaccttcgaactggcggcccagcggctgtcggccgacgtgatcacgctgaacgtgtccacctcatcggcaagcaagggcgaaaccctgctcgacaccctgcgcaacctggaagccatggccgccgacatgttcgtggtacgccacggcgactccggcgctgcacacttcatcgccgagcatgtgtgcccgcaggtggcgatcatcaacggcggtgacggccgccacgcccacccgacccaaggcatgctcgacatgctcaccatccgtcggcacaagggcagctttgaaaacctctcggtggcgatcgtcggcgacatcctgcactcgcgggtcgcgcgctcgaacatgctggccctcaaagccctgggttgcccggatatccgcgtgatcgcgccgaaaaccctgctgcccatcggtatcgaacagtacggcgtgaaggtctacaccgacatggctgcaggcctgaaggacgtggacgtggtgatcatgctgcgcctgcaacgcgagcgcatgaccggtggcctgctgccgagcgaaggcgagttcttccgcctgttcggcctgaccaccgcacgcctggccggcgccaagccggatgccatcgtgatgcaccctggcccgatcaaccgtggcgtggagattgagtcggcggtggccgacggtccgcagtcggtgatcctcaaccaggtgacctacggcatcgccgtacgcatggccgtgctgtccatggccatgagcgggcaaaccgcgcaacgtcaattcgagcaggagaacgcccagtgaagctcagcatcctcggcgcccgcgtcatcgatccggccagtggcctggatcaagttaccgatctgcatctggaagccggcaagatcattgccattggcgcggcgcccgcaggcttcaacgccagcgagaccatcgacgccaaaggcctggtggccgcgcctggcctggtcgacctgaacgtcgcactgcgcgagccgggttacagccgcaagggcaacatcaccagcgaaacccgcgccgccgccgccggtggcgtgactagcctgtgctgcccaccgcacaccaagccggtgctggacacctcggcggtgactgagctgatcctcgaccgcgcccgtgaagccggcaactgcaaagtgttcccaatcggcgcactgagcaagggcctggaaggcgaacaactcgccgagctgatcgccctgcgcgacgccggttgcgtggccttcggcaacggtctggaaagctttcgcagcacccgcacgctgttacgtgccctggagtacgcggccactttcgacctgacggtgatcttccattcccaggaccgtgaccttgccgaaggcggcctggcccatgaaggcgccgtggccagcttcctcggcctgccgggcatcccggaaaccgccgagaccgtggccctggcccgtgacctgctgctggtggaacaaagcggcgtgcgcgcgcacttcagccagttgaccagtgcgcggggcgtggccttgatcgcccaggcgcaggcccgtggcttgccggtgacggcggatgtggcgttgtaccaactgattctgacggacgaagcgctgatcgacttctccagcctgtaccacgtgcaaccgcccctgcgcaccctggccgaccgcgacggtttgcgcgcagcggtgaaatccggtgtggtctcggcgatttccagccatcaccagccccatgaacgggatgccaagctggcaccgtttggcgcgacagagccgggtatcagcagtgttgaactgttgctgccgctggcgatgacgctggtagaggatgggttgctggacttgccgacattgttggcacgcttgagcagcggcccagccgaggccctgcgtctgccggcgggcaagttggcggtgggttcggcggcggatctggtgctgtttgatccggccagctccacggttgccggggaacactggctgtccaggggtgaaaactgcccgttcatcggccatagcctgccggcgacggtgcgttacaccctggtggatggacgtatcacctaccaggcctgatagacatccaatgtgggagggggcttgcccccgatagcggtagatcagtcagcttatctgtagctgacccactgcaatcgggggcaagccccctcccacatgttgatctccaccagaagttaaagatcagcgaccgctgttgcgctcggcattgcggatcgatatctgcgtattcaacgtccagaagtcatacagcacccccaccaggaacaaaccgccggtcagcaggtagatcaggccggagatccatttgccctggtacatgcggtgcacgccaaacaccccgagaaacgccagcagaatccaggccacgttgtattcgataggcccggcggtaaatcgcaggtccgcttcacggtccatggccgggatcaggaacaggtcgatcagccagccgatacccagcaagccaaaggtgaaaaaccagatcgtaccggtcaccggcttgccgtaatagaagcggtgcgctccggtaaaaccgaaaatccacagcaggtaaccgatcaccttgctgtgggtgtcttgctgctcgccaatctgctgataggtgttcatcgcgtacctcttttgcctcgatagataaattttttcattttctttgtgacttttttacgggcgcccgacgtacggcaaatggtatcttccctgccctgaaagccttatgccacctgacttgtgtaggacaattgcggcgaatcgtcgcgtttttcctgattttgacgtcaaggttcagtcgacaaacggcctgagaacgacacaaaaagctgttataaagttgcgcgcaaacccataagagccacgcctaatgcgaccatttttcaagacatggctaaccatttgcctattaatgccactggccgcccacgccaccaatcgtgagcaacgacttcccaacgttaacggtttcacccctaaagtccacagcacgccaagcaccgccaagtcggtcaagctgaccgtcaaccgcccgactcaactgagcaaggcccacggtaaagccacggccggcctggtaggcgtcaacaccaagcagagcagcaccgtgcttagccgcgccgtcaacgtgctcggtactccttatcgttggggcggcagcagcccaagtaaagggttcgactgcagcggtttggtgaaatatgcgttcaacgacgtcgccgctgtggatttgccgcgcacttccaacgccatggccgctggccacgggcagaaggttgatcgcaaggacctgaaaccgggtgacctgctgttcttcaaactgaagagtcgccaggttaaccacgttgccatctacctgggcaacgaccgcttcatccacgcaccgcgccgtggcaaagcggtcagcatcgacacgctgaaaaagccgttctgggacaagaactacgtgattgccaagcgggtgctgcctaaagagcagaacaacctgcgggtcgtgcagcgctgattccaggctggaatgcgataaacaatgtgggagggggcttgcccccgattacagtgggtcagctacaaataagctaactgatccactgctatcggaggcaagccctctccctcatttggagcttcatatatccccaggcaccctcgccttctgctgcgcctcttcccgactgatcaccccctccccgaccaacgccctcaagctcatatccagcgtcttcatccccaacgccccaccggtctgtatggccgagaccatctgcgccaccttgtcctcacggatcagattgcggatagccggcgtgcccagcatgatttcatgggccgccacacgcccgccgccgatcttcctcaccagcacctgggacaccaccgcctgcaacgactccgacagcatcgagcggatcatggccttttcccccgccggaaacacgtccaccagccgatccacggtctttgccgccgacgaggtgtgcaaggtgccgaacaccaggtgcccggtctcagccgccgtcagggccaggcggatggtttccaagtcgcgcagttcacccaccaggatcacgtccgggtcttcccggagcgccgagcgcagggcaacggaaaagctgtgggtatcgcggtgcacctggcgttgattgatcaacgccattttcggcgtgtggataaattcgatggggtcttccagggtcaggatgtgctggcgccgatgccgattgagaaaatcgatcatcgccgccagggtggtggacttgcccgagccggtggggccggtcaccagtaccaggccgcgcggcagttgggcaatacgctggaatacttcccccaggccgaggcgctccaggctttggacctcggacgggatggcacgaaacaccgcgcccatgccacggtcctgccggaacacattggcgcggaaccgcgcgacaccgggcagctcgaaggcaaaatccgtttcaagagatgtttcgaaatccttttgttggtgctgattgagcaatgggctcaacaagtccgccacttgcgggggtgaaagcaccggcccatccagcggccagacctcgccatccacccgcagcatcggcgccaggccggcggacaaatgcaggtcggaggcgccacggcacacgctggccgtgagtaattcagtgatatccatagggctttccatttccagtagaatgccgcggactccatatccacgggcgcatcttgaatgtcgacgatagcagacaacatcggccaggttagccagcgcatccgcgccgctgccgacgccgtgcaacgtgacgcaagcagcatccacctgctggccgtgagcaagaccaaacccgcgcaggcagtgcgcgaagcctatgccgccggcatgcgcgactttggcgagaactatctgcaggaagccctgggcaaacaggccgaattaaccgacctgcccttgagttggcacttcatcggccccattcaatcgaacaagacgcgcgctatcgccgagaacttcgcctgggtgcattccgtggatcgcctcaaaattgcacaacgcctgtccgaacaacgcccggccgacctgccaccgctgaacatctgcatccaggtcaacgtcagcggcgaagccagcaagtccggctgtacacccgccgacctgccagccctggccaacgctatcagcgccctgccgcgcctgaagctgcgtggcctgatggcaatccccgagccgaccgaagagcgcgccgcgcaagacgcagccttcgccaccgtgcgcgagctacaagccagtttgaacctggcgctggacacactttccatgggcatgagccacgaccttgagtcggccattgcccaaggcgccacctgggtgcggatcggtaccgccctgtttggcgcccgcgactacggccagccatgaaatggctgacttccatttagctaaggacctgtcatgagagacacgcgtatagcctttatcggcgccggtaacatggcggccagcctgatcggtggcctgcgggccaagggcctggatgccgcgcagatccgcgccagcgacccgggtgccgacacccgtgcccgcgtcagcgccgagcacggtattgaaacctttgccgacaacgccgaggccatccagggcgtcgatgtaattgtgctggcggtgaagccgcaggccatgaaggccgtgtgcgaaagcctgcgtccaagcctgcagccgcagcaactggtggtgtccatcgccgccggcatcacctgcgccagcatgaacacctggctcggcgcccagccgatcgtgcgctgcatgcccaacacccctgccctggtcagccaaggcgtgagcggcttgtacgccaccgccgaagtgagcgccgaacaacgcgaccaggcgcaagagctgctgtccgccgtgggcctcgccctgtggctggagcaggaacagcaactggacgcggtcaccgccgtatccggcagcggcccggcgtatttcttcctcctgatcgaagccatgaccgccgccggcgtgaagctgggcctatccaaggacgttgccgaacaactggccgagcagaccgccctgggtgctgcgcgcatggcggtgtccagcgatgtggatgccgccgagctgcgccgccgcgtgacctcgccgggcggcaccacacaggcggccatcgagtcgttccaggccgggggctttgaagccctggtggaaaaagcattgggtgccgctgcgcaccgctcggcggaactcgccgaacaactgggcaaataaggagccaacatgattggtttgaataccgcagccgtctacgtgctgcaaaccctcggcagcctctacctgctgatcgtcctgatgcgcttcgtactgcaactggtgcgtgcgaacttctacaacccgctgtgccagttcatcgtcaaggccacccaaccgctgctcaagccgttgcgccggatcatcccgagcctgttcggcctggacatgtcgtcgctggtactggcgatcctggtgcagttggccttgatggcgctgaccctgctgctgacctacggcaccaccggcaacttcgtacagttgctgatctgggccatcatcggcgtgaccgcgctgttcttgaagatcttcttcttcgccctgatcatcagtgtgatcctgtcctgggtcgcccccggtagccacaaccctggcgccgagctggtgaaccagatctgcgagccggccctggcgccgttccgccgcctgctgccaaacctgggcggcctggatatctcgccgatcctggcgttcatggtgctcaagttgctggacatgctggtgatcaacaacctggcggccatgaccgggatgccggagattttgcgtctgctgatctgacgcaaagcaaatgtgagaggggcggtacgacgattcggcttgcccccgataacggtgtaccagccaccatttgtagtgactgacagactgctatcgggggcaagccccctcccacatttcaaaccgctcaggccattgcttgccgctaggtgcagcggtctttagacttacgcctcatttaaacgagagcagggtcgatgccagctgcctttccccccgattctgttggactggtcgtgccccaagtggcgcacttcagcgaaccactggccctggcctgcggccgttcgctgcccgcctacgacctgatctatgaaacctatggccaactgaacgccacggcgagcaacgccgtgctgatctgccatgccttgtccggccatcatcacgcagccggtttccattcggtcgacgagcgcaaacccggctggtgggacagttgcatcggccccggcaagcccatcgacaccaacaagttctttgtggtcagcctgaacaacctcggcggctgcaacggctcaaccggccccagcagcctcaacccggaaaccggcaagccattcggcgccgacttcccggtgctcaccgtggaagactgggtgcatagccaagcgcgcctggccgaccggctgggcatcagccagtgggctgcggtgatcggcggcagcctgggcggcatgcaggcactgcaatggaccatcacctacccggaccgcgtgcgccactgcctggcaatcgcctcggcccccaagctgtcggcgcagaacatcgccttcaacgaagtggcgcgccaggccatcctcaccgacccggagttccacggtggttcgttccaggaagccggcgtgattcccaagcgcggcctgatgctggcgcggatggtcgggcatatcacctacctgtccgatgactccatgggcgagaaattcggccgtggcctcaagagcgagaaactcaactacgacttccacagcgtcgagttccaggtggaaagctacctgcgctaccagggcgaggagttctcggggcgtttcgatgccaacacctacctgctgatgaccaaggcgctggactacttcgacccggccgcccaccacgacgacgacctggcgaaaaccttcgaaggcgccacggccaagttctgcgtgatgtcgttcaccaccgactggcgcttctcgccggcccgctcccgcgagctggtggacgcgctgatggcggcacgcaaagacgtctgctacctggagatcgatgcaccgcaaggccacgacgccttcctgatcccgatcccgcgttacttgcaggcgttcggcaattacatgaaccggattactgtgtgagaacgccatgagagccgacctggaaatcatccaagactggatccccgccggcagccgcgtgctcgacctgggctgcggcgatggcgaactgctgagctggctgcgcgacaacaagcaagtcaccggctacggcctggaaaacgactcggacaacatcgcccagtgcgtggccaagggcatcaacgtgatcgagcaggacctggacaagggcctgggcaactttgccagcaacagcttcgacatcgtggtgatgacccaggcgctgcaggcggtgcactacccggaccgcatcctcgacgaaatgctgcgtgtaggccgccagtgcatcatcaccttccccaacttcgggcactggcgctgccgctggtacctggccaccaagggccgcatgccggtgtcggacttcctgccgtacacctggtacaacacgccgaacatccacttctgcaccttcgaagacttcgaagccctgtgcagtgagcgtgaagccaaggtgatcaaccgtcttgccgtcgatcaacagcatcgtcacggctgggcgagtaaactatggcccaatctgttgggcgaaatcggtatctaccgggtcagcagtcctggcctgacggaccacaagattgccgtctaatcatcttcaagagggacgctcatgagtcgtttggctatttttctattgaccgcctgcctgggcgccaacgccatggccgcggacgctatagacgctaaccgcaagaaagacttcggcgatatcaccgtccactacaacacgttcacctccagcttcctgcaaccggaaaccgcccaggccgtcggcgtggtgcgcagcaaggagaagggcctgatcaacgtgaccgtgatcaagggcgtgaccccggtggccgcgcaagtgaccggcaccatcaaggacttgggcggcaagagcgaagtcctcaccttcaaacagatcaacgagaaaggcggcatcaattacctggcgccctactccgtgacgcagcgcgaatacaagacgtttaccatcaacgttgaaaccggcggcaaagcccatagcttccagttcaaccaggaactgtttccggcggaataatgaacctcacccaactcgtactggccagccataacgccggcaaactcaaagaactgcaagccatgctcggtgactccgtgcaactgcgctccatcggcgagttcagccaggtggagccggaagagaccggcctgtcgttcgtcgagaacgctatcctcaaggcgcgcaacgccgcacgtatctccggtttgccggcgctggcggatgactcggggctggcggtggacttcctcggcggcgcgcctggcatctattcggcacgctacgccgacggcaaaggcgatgcagccaacaacgccaagctgctggacgcgctcaaggacgtaccggacgccgaacgcggcgctcagttcgtctgcgtgctggccctggtgcggcacgccgatgacccgctgccgatcctctgcgaaggcctgtggcacgggcgcatcctgcatgccgccagcggcgagcatgggtttggctatgacccgctgttctgggtgccggagcgtaacgtttccagtgccgaactgagcccggccgacaagaaccagatcagccaccgtgctcgcgcaatggatttgctgcgccaacgcctgagcctgaaatgacccagaacacctctgcgcagccgctgatccacggcggcgcgcaaacacctcgggcggccttgcctgtgctgccgcccctggcgctgtacatccacatcccgtggtgcgtgcgcaaatgcccttattgcgacttcaactcccacaccgccagcaaagtgctgccggaagaagagtatgtggacgcgctgctggcggaccttgatcaggacctgcacgccgtgtatggccgtgagctgagttcgatcttcttcggcggcggtacgccaagcctgttcagcgccgcagcgctggggcggctgctcaagggtgtggaagcacgcatcccgtttgccggcgatatcgagatcaccctggaagccaaccccgggacgttcgagcaagaaaagttcgtggcctatcgcaagctggggatcaatcgcctgtccatcggcatccagagcttccagcaggcaaagcttgaggccctcggccgtatccacaatggcgacgaagccgtacgcgccgccggcatggcgcgccaggctggctttgataacttcaacctggacttgatgcacgggctgcccgatcagtccctggacgatgccttgagcgacctgcgccaggccatcgctttgaagccgacgcacttgtcctggtaccaactgaccctagaacccaacaccgtgttctggaaccagccacctgcgctgccggaagacgacaccctgtgggacatccaggaagccggccaggcgctgctcgccgagcacggttacgcgcaatatgaagtgtcggcgtatgcccaaccgggtcgcccggcgcggcataacctcaattactggagcttcggtgactttatcggcatcggcgccggcgcccacggcaagctcagccacccggacgggcgcatcgtgcgcacttggaagacgcgggcaccgaaggactacctcaacccggccaaaagcttccaggccggcgcgaaggaactgaccaacgaagagctgccattcgagttcctgatgaacgccctgcgcctcaccgaaggcgtcgatgccaggctctacgccgagcgtaccggtctcgatctggcgagcctcgatgaaggccgccgcgaggcagaacaaagtggcttaatgcaggtcgaaccgtcacgcctggcggcgaccgaccgcgggcaactctttctcaatgatctgttgcagaagtttttgagctgacgctcttaaggaaatcgaatggatttggtactcgacctgctcgccaccgtgtcccgctggagccgtagcaacctgtcggaaatctccctggccctggtgggctgcctgttggtgctgtttggcgccgacatcaagggctggatcgaagcacgcctgggcagcatcgcgggtgcgttgcgcgtgccgttgatggcgctggtgtgcatgatcggcagcggcgcggcgttgatttatgccacgccgtggattgtgcgggggttgagccagttcaataactacagcctggcgccggtgttgattgtcgtactggtgttgatcggcgtagtcgcagaccgccgctgatcctgagcaaaacgtcgatacaaatgtgggagggggcttgcccccgatggcggtggaccagtcactctatggggtgactgacactctgctatcgggggcaagcgccctcccacatttgattgcattgcaactcagaggcgagttacgccagcttctcgaacttcaaatcccacaccccatgccccagccgctcaccacgacgctcgaacttggtaatcggacgctcggccgggcgtggcacgcatttgccgttttcagccaggttgcggtagccaggggccacgttcatcacttccagcatgtattccgcatacggctcccaatcggtggccatgtgcaggatgccgcccactttcagcttggtgcgcaccagttccgcaaaggaggcctggacgatgcggcgcttgtggtgacgggctttgtgccatgggtccgggaagaacagcatcagacggtcgaggctgttgtcggcgatgcagcggttgagcacttcgatcgcgtcgcaatcgtagacccgcaggttggtcaggccttgggtcaacacgccgttgagcagcgcgccgacacctggccggtggacttcaacgccgatgaagtcctggtccggcgcagcggcggccatttccagcagggagtggcccatgccgaaaccgatttccagggaacgcggggccgaacggccaaacacctggtcgtagtccaccggcgcgtcggccaatggcaacacgaacaacggcgtaccttgctccaggcccttttgctggccttcggtcatacgaccggcgcgcatcacaaaagtcttgatgcggcggtgcttggactcgtcgcctgcttccagggtgttcggcgtttcgtttgattcagtcatcaatggctcttacttgatcagaccatccagcggcgaggaggcgctggcgtagagttttttcggcatgcggccggcgaggtaggccaggcggcccgcgacgatggcgtggttcatggcttcggccatcaggatcggttgctgggcgtgggcgatggccgagttcatcagcaccgcatcgcagcccagttccatggcgatggttgcgtcggaggccgtgcccacgcccgcatccaccagcaccgggatcttggcttcttcgaggatgatctgcaggttgtagggattgcagatacccaggccggaaccgatcaggccggccagtggcatcaccgcgatgcagccgatttccgccagttggcgcgcaatgatcgggtcatcgctggtgtagaccatcacgtcgaaaccttccttgaccagggtttcggcggccttgagggtttcgatcacgttggggaacagggttttctggtcggccagcacttccagcttcacaaggttgtggccatcgagcagctcacgggccaggcggcaggtgcgcacggcttcaatggcgtcgtagcaaccggcggtgttcggcaggaaggtgtagcggtccggcgacagcacttcgagcaggtttggctcgccttcgatctggccgaggttggtgcggcgcacggcgaaagtgacgatctcggcgcccgaggcttcgatggccaggcgggtttcttccatgtcgcggtacttgccggtgccgaccagcaggcgggactggtaggtacagccggccaggacgaaaggcttgtcgctacgaacgatgctcatgggaaatcctcgaaatggggtgaggttctgcagaattcaggaagctgcgcgatcagccgccgccgatggcgtggaccacttcgacctggtcgccttcggcgagcgcggtctcggcgtgcaggctacgcgggacgatatccaggttgagttccactgcgacgcgacgcccggtcaggtccaggcgggtcagcagggccgcaacggtttcaccgtcgggcagttcaaaggattcgccgttcaactgaatgcgcatgccacgggccgtcatcgtttttaggggtcggcattctagcccgattgaggttgccggcccaagtcccttggtcaggctgcctgcaaacgccacgccgccaggcccaggaagaaccagccgagcaggaaggcaaggccgccaaacggcgtgatgatcccgagtttgctgatgccggtcagggtcagcacatacaggctgccggagaacagcaggatgccgacggtaaacgagatgcccgcccagctgaccaatcggccaggaatatgcgccgccagcagcgccacgccgaacagtgccagggcgtgcaccaactggtaggtcacgccggtgtggaagatcgccaggtactcagcgctcaggcggtttttcaggccgtgggcggcgaaggcgccaagggcgacaccggtgaagccgaaaaaggcagccaacatcagaaagccacgcagcatgaggaactccagtcagactcatagggcagggtctgtataatggcccgctcaacgggttcggccaagccatctctatgctgcgtctcctcttcaaacgctttctcaacgtcgtcaaatggtttgccatcggcagtgtgctgctggtgctgctgtttcgtgtcgtcccgccgcccttcaccgcgctgatggtggagcgcaaggtcgaatcctggttcgacggcgagcccattgacctgcagcgcacctgggtgccgtgggacgagatctccgatgacctcaaagtggcggtgatggctggcgaagaccaacgcttcccgcagcattggggctttgatttcggcgcgatccaggcggcgatcctgcacaacgagcgcggcggctcgattcgcggtgccagcacgttgagccagcaagtgtcgaagaacctgtttctgtgggccggccgcagttatctgcgcaaaggcctggaagcctggtttaccgggttgatcgaggtgttgtggcccaagcagcggattcttgaggtgtacctcaatagcgtggagtgggacgaaggggtatttggggcggaagcggcggcgcggcatcactttggggtgagtgccaaggggttatcgcggcagcaggccagctatctggcggctgttttgcccaacccacgggtgtggagtgccagtcatccgacggcgtatgtggcgcggcgcgctgcttggattcggcagcagatgggtcagttgggtggagacggttacctggttgaactgaacaactcccgcaaggccccctggtccgactgacacaacaaaaacaaatgtgggagggggcttgcccccgatagcgatggaacagtcaccttgatgttgactgacactctgctatcgggggcaagccccctcccatatttttaggctgcgatggacagtttcagcttgttcatcgcgcttttctcaagctgacgaatccgctcggccgacacgttgtacttctgcgccaggtcatgcagcgtggccttgtcttccgccagccagcgctggtagaggatgtcacggctgcggtcgtccagcacttccagcgcttcatgcaggttgtggttggagttgtcgctccagtccgcatcctccagttgacgcgccgggtcgtagcgatggtcttccaggtagttggccggcgattggaaggcgctgtcgtcgtccgcttcagcagcggggtcgaaggccatgtcatggccggtcaggcggctttccatctcgcgcacttcacgcggctccacgccgaggctttcggccacgcggtgcacttcctcgttgttcagccacgccaggcgtttcttctggctgcgcaggttgaagaacagtttgcgctgggccttggtggtcgccactttcacgatgcgccagttgcgcaggatgaattcgtggatttccgccttgatccagtgcacggcaaacgacaccaggcgcacacccatctcggggttgaagcgctttaccgccttcatcaggccgacgttgccttcctggatcaggtcagcctgggccaggccgtagccgctatagctacgggcgatatgtacgacaaaacgcaggtgggcgagcaccatctgccgagccgcccccaaatcctgctcatagtagagactctcggccagttcacgctcctgctcgggcgtcagcaatggaatgctgttgaccgtgtgcacataggcttccaggttcgcacccgggaccaaggcataagcaggttgcaaagaagtggtcatacgaaaaaacctccgactcacataactcgtgcagtgaagcactgcgaaaattgaccgggaaccgtaggacaagttccctaaaccaccaatacggtcaatacaaacgaaaccacattaatctgacattaactacttcggtgccagctcacgtaaatgacgagcgaccgcaatccacgcaccgatataccccaacaataccgcgccaagcaagagactcagaccatcggctaccggcacgccggccagggcgaaatcactgccgtagagtccggcaagcccgacaaccgcgtcgttcagccagtccaggccaaaagccagcacgccccaggacaaaatcccggcaccgaagccataaagcgcgcccatgtacagaaaaggacgacgcacatagctgtccgtgccgccgaccagtttaatcacttctatctcggtgcgacggttttcaatatgaagacgaatggtattacctatcaccaaaagtaatgcagacaccaacagcaccgtcaggccgaacacaaaccggtcgcccagcttgaggatcgccgccaggcgctctacccagactagatcaagctgcgcctgctgtaccttgggcatctctgcgagtttttgtcgcagggcctccagcgccggcttatcgacttcgttcggcgtcaccagcaccacgcccggcagcgggttctgtggcagctccttgagcgcctcgcccaggccggactgttgctggaactcttccagcgcctgatcgcggctgatgtactcggcatccgccacgccggggatgttcttgatgtcgtcgcgtaacgcttcgccatctttggcactggcgtcgatattcaggtacagcgaaatctgcgctgcgcgctgccaggaaccgcccaggcgctccacattattaagcagcagcgacaaacccatcggcaggctcagggccaccgccatcaccaggcaggtgaaaaagctgccgatcggctgtttgcccaggcggcgcaggctgtcgaccaggctggcgcgatggctctcgatccaggcgcgcagcaaggtgctgaaatccggaccgtcgtcatcatgctcgtgttttttcttcggcggttgcgggtcggccggtttcggcgccacgcgttcggagactttagggctgcgtgttgcactcatacgccggcctccccgtcaccgatcaggcggccgcgttgcagggtcagcatgcgatggcgcatgcgtgcgatcagtgccaggtcgtgactggcgatcagcacgctggtgcccaggcggttgatgtcttcgaatacgcccatgatttcggccgccaggcgcgggtcaaggttaccggtgggttcgtccgccagcagcagcgccgggcggtggacgatggcgcgggcgataccgacgcgctgttgctggccggtggagaggtcgccggggtacaggtcggtcttgtccgacaacgccacgcgctccagggccgaatccacgcgcttgacgatctcggccttggacagcccgaggatctgcaacggcagcgccacgttattgaacacggtgcgatcaaacaacagctggtgattctggaacaccacgccgatctggcggcgcaggaatggaatctgcgcattgctgatggtggccaagtcctgacccgccagcagcaacttgccagtggtcgggcgttccatggccagcagcagccgcaacaaggtacttttgccggcgccggagtgcccggttacaaatagaaactcgccgcgccgtactcgaaagctcagctcatgcaagccgacatgcccgttggcatagcgtttaccgacctgttcgaatcgaatcatgaacgctcccgctcggcaaacagtgcctgtacaaagggttcggcttcaaaggtgcgcagatcgtcgatgccttcaccaacgccgatataacgaatcggcaacccgaactgtttggccagggcgaagatcacaccgcccttggccgtgccgtcgagcttagtcaatgccaggccggtcagttgtaccgtctggttgaattgtttggcctggctgatggcgttctggccggtgccggcatccagcaccagcaggacctcgtgcggcgcgtctgcgtcgagcttgccgatcacccggcgaacctttttcagctcttccatcaaattgtctttggtgtgcaggcgaccggcggtatcagcgatcagcacgtcgatgttacgggccttggcggcctgcacggcatcgaagatcaccgaagcggaatcggcgccggtgtgctgggcgatgaccgggatcttgttgcgctcgccccacacctgcagctgttccaccgcagcggcacggaaggtatcgccggctgccagcatgactttcttgccttcggactgcagcttcttggccagcttgccgatagtggtggtcttgccggcaccgttgacgcccaccaccaggatcacgaaaggcttcttcggggtgatcaccagcggcgcttccaccggcttgagcatcgcggccagctcggcctgcagggatttgtacaacgcgtcggcgtcggtcagctgcttgcgcgcgaccttctgggtgaggctctggatgatcacggcagtggcttcaacgcccacgtcggcggtgagcaggcgggtttcgatgtcttccagcagttcgtcatcgatgaccttcttgccgaggaacaggctggccatgccttcgccgatactggcgctggttttgctcaggccttgcttgaggcgggcgaagaagccggtcttgctggtttcggcaggggcgacgacgggctccggctcgacaaccgcaggcacggccacctcggccacagccggaatcggcggggcgatgtgctcagcctgcacatcttcgaccagcgccacgggctcttcagccaccggcagttccggccacggtttgtgctcgggttccggctcaggttccgggaccgcctcgacgaccggctgcaacaccggctcggccatcggcaacaccaccggcgccggggtttcggcaaccggttcggcttctactatgggttctgggataggttcaggcagaacctgcggctgttcgtcgacggtttcctgcggctttttgcgcagccatccgaacaggcctttcttctcgccagccgcagctggggtcttcttgtcgtcgttggaaccaaacatggagacggctatctcaaggtagcgacgcgccaaggggcgcgtcggtaaataaaattcgatgcgtaacagactgttttttagccagctcgttcatgcgcaacattttgtaaggcctaaatagggcctaaacaagactgccgcagtggccgtccgtaaatccgaccagtatcctagcacctcctcgcccgccgacgctaagaccaagcgggcagcccaacaggtttaaaaacgaatgaatgctctagcccgccgcgccgcaggcctgctgttcagcacagtttgtctgcctctttcagccatggctgccgacccacaacccacccatgaattcaccctggacaacggcctcaaggtggtcgtacgcgaagaccatcgcgcgccggtggtggtttcccaggtctggtacaaggtcggttcgagctacgaaaccccgggccagaccggtttgtcccacgccctggaacacatgatgttcaagggcagcgccaaggtcggccccggcgaagcctcgctgatccttcgcgacctgggcgccgaagagaacgccttcaccagcgatgactacaccgcttattaccaggtgctggcccgtgatcggctgggcgttgccttcgagctggaagccgaccgcatggccagcctgcgcctgccggccgacgaattcagccgcgaaatcgaggtaatcaaggaagagcgccgcctgcgcaccgacgacaacccgatgtccaaggcctacgagcgcttcaaggccatggccttcccggccagcggctaccacacgccgaccatcggttggatggccgacctggaccgcatgaaagtcgaagagctgcgccactggtaccaatcctggtacgtcccgaacaacgccaccctggtggtagtcggcgatgtcaccccggacgaggtgaagaacctggccaagcgctacttcggcccgatccccaagcgtgatgtgccaccggccaagatcccgatggaactggccgagcccggcgagcgcctgctgacgatgcatgtgaaaacccaattgccgagcgtgatgctgggctttaacgtgccgggcctggccaccgccgaagacaaacgttcggtgcaggccctgcgcctgatctcggccttgctggacggcggctacagcgcccgcatctcagaacagttggagcgtggtgaagagctggtttccgccgcctccaccaactacgacgcctacacccgtggcgataccctgttcatgctgagcgccacgccgaatcagcagaagaagaaaaccgtcgcccaggcagaagccggcctgtggcgcctgctggaagagttgaaggccaagccgccgaccgccgaagaactggaacgcatccgcgcccaggtcattgccggcctggtctaccagcgtgactccatcaccagccaggccacggccatcggctccctggagaccgtcggcctgtcctggaaactgatggacacggagctcgccgacctgcaaagcgtgaccccggaagatatccagaaagccgcgcgcacctatttcacccgcgaacgtctgagcgtcgcccatgttttgcctgaggagaccgctcatgagtgatcgcaaaagcagccgcctgatcttccccggcctcgtcgtcgttaccctgatcgccgccagcgccgtgtacttcctgcgccccagcgactccgtcgccagcccggcattggaaaaagcccaatcgagcaaccagctgcaatccctggcggaactggacggcaaggcgccgaccaaccgcaagctcgacgttcagacctggaccaccgccgaaggcgccaaggtgctgttcgtcgaagcccatgaactgccgatgttcgacatgcgcatcctgtttgccgccggcagcagccaggacggcaacgtaccgggcctggcgctgatgaccaacgccatgctcaacgaaggtgtaccgggcaaggacgtgagccagatcgcccgtgatttcgaaggcctgggcgctgacttcggcaatggcgcttaccgcgacatggcgctggtgtccctgcgcagcctcagtgacagtagcaaacgcgacgccgccctgagcctgtttgaccaggtgatcggcaaaccgaccttcccggccgactccctggcccggatcaagaaccagatcctcgccggcttcgagtaccagaagcagaaccccggcaagctggccagccttgaactgttcaagcgcctgtacggcgatcacccctacgcgcacccgagcgaaggcacgcccgaaagcgtgccgaagattaccctcgcgcagttgcaggcgttccacgccaaggcttacgcagcgggcaacgcggtgattgcggtggtgggtgacctgacccgcgccgaagccgaagccatgacggccaaggtttctgcatcgctgcccaagggcccggcgctggcgaagatcgcccagccgaccgaacccaaaccgggcctgagccgaatcgagttcccatccaagcaaacccacctgctgttcgcgcaactgggcatcgatcgtgccgacccggactacgcagccttgtccctgggtaaccagatcctcggcggcggcggtttcggcacccgcctgatgagcgaagtgcgtgaaaagcgcggcctgacctatggcgtgtactccggcttctcgccgatgcaggtgcgcggcccgttcatgatcaacctgcagacccgcgcggaaatgagcggcggcaccctgcgcctggtcgaggacgtggtggccgattacctcaagaccggcccgacgcaaaaggaactggatgacgccaaacgcgagctggccggcagcttcccgctgtcgaccgcgagcaatgccgatatcgtcgggcagttgggcgcgatgggtttctacaacctgccgctgacctatctggaagatttcgtgaaacaatcccaggccctgaccgtagagcaggtcaaggctgcaatgaacaaacacttgagcgccgacaagatggtcatcgtgaccgccggcccgacgattgcgcaaaagccactaccgccccccactgataaacccgccgagcagccgctcggggttccggagcattaatggccagttcatctcgcccgaaaaaacctgtccacaacgtgcataacggggtgggccagctgcgcatcattggcggcgaatggcgcagccgcaagctgagcttccccgacgtcgtaggcctgcgcccgacgccggaccgcgtgcgtgaaaccctgttcaactggctcgcgccgtacatcgccggcgccaaggtactcgacccgttcgccggcagtggcgcgctgttcctggaggcgctgtcccgtggcgccgccctgggccaggcgctggacgccagcaatgtggcggtgtccagcctcaaggaacacctgggcaccctgcgctgcaccaccggccaggtgcaaaccgccgacgcgctgcgctatctcgaaacccagccggccagcgaattcgacgtggtgttcctcgacccgccgttcaaccagaacctgctgccgagcgtgtgcgcgttgctggaagaacgccaatggctggcagcggattcgtggatctacactgaaagcgagaccgcgccttctaccctgggcttgccggccacctggcggctacaccgggaacaaaagtccggacgggtgtattacgcgttgtggcaacgcagcgccgcctgacctctgtttgtggcgagcgggcttgccccgcgttgggctgcgcagcagccccaaaaccagcaatgatgttctaactgattattcgcggtgttattgatggggctacttcgcagcccaacgcggggcaagcccgctcgccacagttaaatgcatccgcagcagagcgtgtcatgaccccttcttccgacctgttcacccccgccttcggcctcggcaacccccacctgcagacactgtgggggccgctgtggcgccccaccacccacatcgaacgccaacgcgaacgcctgtggctggacgacggcgacttcctcgacctcgactggcatggcccccatgacgcgcaagcaccgttggtgctggtgctgcacgggttgaccggttcctccaactcaccctacgtggccggcctgcaaaaagccctggccgcgcaaggctgggccagcgcggcgttgaactggcgcggctgctcgggcgaaccgaacctgttggcgcgcagctatcactccggcgccagcgaagacctggcggcggcgattgcccatctgcgggccaagcgaccgctggcgccgctgtatgcggtgggttactcactgggtggcaatgtgctgctcaagcatttgggcgaaaccggcgaggcatccgggctgcaaggcgcggcggcggtgtcggtgccgttccgtctggaccaatgcgcagaccgtatcggcctgggcttttcgcgggtctatcagaagcatttcatgcgggagatgctggcgtatatccgcgtcaagcaacgccgttttctacaggacggccgggcggaagggttgaagacgcttgaagccctgggctcgttggagaagatgcgcacgttttgggacttcgacggccgggtcaccgcgccgttgcatggtttcctgagtgccgaggactattaccgccgcgcgtcgagccgctattacctgggtgatatccgcacgcccaccctgatcatccaggccgccgatgacccgtttgtgtttgcccacagcctgcccgaggccagtgagctgtcggactgcaccgagttcgaattgctggccaagggcgggcatgtcggttttgtcgatggaacgttgaagcgccccggttactatctggagcgccgtattccggcctggttactcagtcgccggtagcgatggcccgcgccggatcggtgatccactcgctccacgaccctgcatacaacttgcccaatgggtaacccgccaggctcagggcgaacaggttatggcacgccgtcactcctgaaccgcaatacgccaccagctcatccggcgagcgcccctgtaatttttcggcgaagcgttgcttgagctgctcggcgggcaagaagcggccgtccggacccaggttttcgttgaatgccgcacactgcgccccagggatgtgcccggcaatcgggtcgatgggttccacttcaccacgaaagcgcggctgggcgcgggcatcgatcagggtcaacccgggttggcccaggcgtttttgcaggtgctcggcatccagcaccaggcgattgtccggcgtaccgacaaaggtgcccggctcaaccaccggtgcgtccaggctcagcgggaacccggccgcatgccaggccttgaggccaccatccagaataaagacgccatcacgcttgcccagccaggccagcaaccaccaggcccgtgcggcataggctccggggccgtcgtcatacaacacgatatcggtgtcggcgttgatcccccaggcacgcaattgctcggcgaaggcatctgcctccggcaacggatggcgaccggtcacacccttggtcaccggcccgctgaggtggcgctccaggtcagcatactgcgcgccctcgatatgcccttcggcatagctgcagagcccgtagtccgggtcttccaaggcaaaacggcaatcgaggatcaccagcccggccgacttctggcgctcggccagttgctgggggctgatcaattgggcgagcggcatgacggactcctatgagcagattcgggaaaggtcctacttcacttcttccaatgcctgattcaacggcacgtaaaattctttgaacaaggcatcgacggcctccttcgcctggggcgtgacaaaccccgcctccagcaccagcacctgatacaccccgcgcttgatcgcctcggcgctcaaatgtgcagagttttcattggtggtgcacagaaagcgcacccaggaggtgaggatgatccaggcattgagggtcagggcttcggtttgcaccgggtccatattgaggatgccagcgtcgacaaacccttggtaaatggcgccgccctgggtcaggcagcgctgggaaaaacgccggtagccggtggccagttccgggtcgctttccagcaggtgttcgaggtcgcggtgcaggaaacggtagcgccacatgccggccagaacggcctgcaggtagaagcgtttgtcttcgacggtgacggcgcggccttggggcgggcgcaggaaactgtccaccagggcttcgtattcgcgaaacagcacggcgatgatcgcctgcttgttggggaagtggtagtacaggttgcccggcgaaatttccatgtgggcggcaatgtggttggtgctcacactgcgctcgccctgctggttaaaaagctccaggctggtttgcacaatgcgctcgctggtctttactcgtggtgccataggggatcagcttctgtacacgtgataaggcatcttacggcctatccttgcacggataaaaccggatgttgctgcaatgttatttgacaatttagagtaacgactctaaaaatccaggcagacctataacaatcgggaacgccgccatgtctgccaacgttgcctatctgcaagattcccaggcactggaccagctccagcacctgttcgatacccagcgccgcgcctacgccgccaacccgatgccgccagccacgcagcgccagcaatggctcaaggccctgcgcgatctgctcagcgacgagcgccaggcgctgatcgacacgatcagccaggacttcagccaccgcagtgccgacgaaaccctgttcgccgaactgatgcccagcctgcatggcattcactatgccagcaaacacctcaagggttggatgaaaccttcccggcgggctgtaggcattgccttccaaccggcttcggccaaagtcatctaccaaccgctgggcgtagtcggggtgatcgtgccctggaactacccgttgtacctggccatcggcccgctggtcggcgctctcgccgccggcaaccgggtgatgctcaagctcagtgagtccacacccgctaccggcgaattgctcaaggcgctgctggcgaaagtcttcccggaagacctggtgtgcgtggtgctgggtgaagccgaggtaggcatggcgttttccaagctgcccttcgaccacctgctgtttaccggcgccaccagcattggcaagcatgtgatgcgtgcggcggccgaacacctcacgccggtcaccctggagttgggcggcaagtcgccggccatcgtgtctgcggatgtaccgctcaaggacgccgccgaacgtatcgccttcggtaaggcattgaacgccgggcaaacctgcgtggcgcccgactatgtattggtgccggaagaccgcgtcgacggtttcgtcgaggcctacacccaggctgttcgcgggttttatccgaccctggccgacaacccggactacaccgccatcatcaacgaacggcaactggcccggctgaatgcctacgtcaaggacgccaccgacaagggcgccaccctgattccgctgtacgaccagggccaggcgcggcgcatggcccacagcctgttgctgaatgtcagcgatgacatgaccgtgatgcaggacgagatcttcggcccggtactgccgatcgtgccgtatcgcggtatcgaccaggcctttgcctatatcaaccaacgccctcgcccactggccctgtactacttcggctacaacaagcgcgagcaggaccgcgtgctccacgaaacccactccggcggcgtatgcctgaacgacacgctgctgcatgtggctcaggacgatatgccctttggcggcatcggcccgtcgggcatgggccactaccacggccacgaaggcttcctgacgttcagcaaagccaagggcgtgctggtgaagcagcgcctgaacgcggcgaagctgatctacccgccctacggcaaagctatccagaagttgatccagaagctgttcgttcgctgaaaccgccacccacgggataacaataacaatgaaccctagcctgactgattcacccgcgctgtcgcggcgcggcgtcttgaagattggcctgtgcgccagcgccttcctggcgaccgccgggttgggcgccagcctcagcggttgctccagcagcacgccggccagcggctttgccatgctgcgagccagtgacctgccgttcctgcgcgcggtgatcccggtgctgctcgaaggcgtggccagcgcccaggaagttgccagcgggattgaagacacccttaagaagctcgactacagcctgcaacacctgtcgccggagatgttcaagctcacccagcaactgttcgacgtattgggcatgggcgtcacccgtgggccgttgaccgggatctggggcagttgggaaaacgccagcggcgagcagatacgcaacttcctgcaccgctgggaaaacagctacctgaacctgctgcgcatgggccagggctcgctgctcaagctggtgatcatggcctggtatttccagccggcgtcctgggcgcattgcggttaccccggcccaccgaagatttgattcgccgcccccccataaaaacaagagacgaccctgatgcccgtacccgacctgttccgcgacggcatggcccgtggctggaaaacccacaatggcgccgcgctcgataacgacctgaccctggaagccgatgtggcgatcatcggcagcggcgccggtggcggcaccactgccgagattctcagcgccgccggctacaaggtgctgctgatcgaagaaggcccgctcaagaccagcagtgacttcaaactgctggaagacgaggcctacgccagcctgtaccaggaaggtatcggccgcatgagcaaggacggcgccatcaccatcctgcaaggccgggcggtgggcggcactacgctgatcaactggacgtcgagctttcgcaccccggacgccaccctcgcccactgggccagcgaatacgcggtgaaaggccacagcagcgccgagatggcaccgtggttcgaaaagatggagcagcgcctgggcatcgcaccgtgggccatccccccgaatgccaacaacgatgtcatccgcaaaggctgcgaaaagctcggctacagctggcatgtgatcccacgtaacgtgcgcggctgtttcaacctgggttattgcggcatgggctgcccagtcaatgccaagcagtcgatgctggtgacgaccatcccgtccaccctggaaaaaggcggagagctgttgtacctggcccgcgccgagcgcctcctctataaaggcgacgctatcagtagcctggaatgcgtggcgatggacgagcgttgcgtggcgcctaccggacgcaagatcaccgtgaaggccaggcattacgtgctctccggcggcggcatcaacagcccggcgctgctgatgcgctcggatgcacccgacccgcactcgcggctaggcaagcgtacctttctgcatctggtgaacttctccgccgggctgttcgacgaggtgatcaacccgttctacggcgcgccgcagtcgatctattccgatcactttcaatggcaggacggcactaccggcaaaatgtcctacaagctggaagcaccgcccctgcatccaggcttagccagcaccttgttcggcggctatggcacgcagaacgccttggacatgagccaattgccgcatacccacgccatgcttgcgctgttgcgtgacggttttcaccccgacagccagggcggcagcgtggatttacgcggtgacggtacgccggtgctcgattatcaggtctccccctatgcctgggacggcctgcgccgggcgtttcacagcatggccgagatccagttcgcggcgggcgccaagtcggtcaagccgctacaccacgacgcgcggttcgtgaacaccttggccgaggcacgccgtgtgattgacgggttgaacctggaactgcaccgaaccacgctaggcagcgcccatgtgatgggcggctgcgccatgggtgaagacccgaaaaacgcagtggccgacagcctgggtcgccatcaccagttgcgcaatctgtcgatccacgatggttctctattccccaccagcattggggccaatccacaattatcggtgtacggtttgaccgcccaactggcgacagcgttggccgaacgtctgaaaacagcgtgaaaaaacacagtattcgccgtgtctatagtgctttcttctgcataagttgactttcccgaccgggacggctgcgataccatccggttccccaacggactccgccaggacgacgcgatgaaccgagtgttgtacccaggtaccttcgacccgattaccaaaggccatggcgatctggtcgaacgtgcctcacgcttgttcgaccatgtgatcatcgcggtcgcagccagccccaagaaaaacccgctgtttcccctggaacagcgcgtggagctggcgcgtgaggtcaccaaacacctgcccaatgtggaagtggtgggcttttccacactgctggcgcatttcgccaaggagcagaatgccaatgtgttcctgcgcggcctgcgtgcggtgtcggacttcgaatacgaattccagctggccaacatgaaccgccaattggcgccggacgtggaaagcttgttcctcacgccgtcggagcgttattcgttcatttcctcgacgttggtccgtgaaattgccgctttgggcggagatatcaccaagttcgtgcacccggccgtggcggatgcactgaccctgcgcttcaagaaataagcccccaatcggcgcctgctcgcactgcgggcgccaatgcggcacaattgcgcgcattagttttcagatgccttggctgacagccctggcaggagtttccatgtccctgatcatcaccgacgattgcatcaactgcgacgtctgcgaacccgagtgcccgaacgccgcaatttcccagggcgaagagatctacgtgatcgacccgaacctgtgcacccagtgcgtcggccactacgacgagccgcagtgccagcaggtttgtccggtggattgcattccgctggatgaggcccatccggaaacggaagagcagctaatggccaagtaccggttgattaccggtaaagcctaagactggcacttggggcaaaacacactcgcccgctgtcccagcaccacattgcgcaattcgctgccgcagaccttgcacgcctcgccgccccggccatagacgaacagttcctgctggaaataccccggttgcccgtcgccgccgataaagtcgcgcaacgtggtgccgccacgctcgatggcagccgccagcacgcgcttgatctcgatcgccagcttcaaataacgtgctcgtgagataccgccggcctcgcgacgcggatcgatccccgccgcaaacagcgcttctgtcgcgtagatattgcccacacccaccaccaccgcgttgtccatgatgaacggcttcaccgccatcgaccgcccacgggacagctggaacagacgctcaccgtcaaacaggtcggtcagcggctccggccccaggcggatcagcagttcatggttgtgcgggtcctggctccagagcatcgcgccaaaccgccgagggtcggtgtagcgcaaggccaggccggactccagttcgatatccacatgctcatgcttggccgctggcatgccaacctctaccaggcgcaagttgcccgacatgccgaggtggctgatcaaggtgcccacttcggcattgatcaacaggtacttggcccgccgctccaccagcacgatgcgctggccggacaggcgcacatcgaggtcttccgggatcggccagcgcaagcgtcgctcgcgcaccaccacgcggctgacccgctggccttccaggtgcggcgcgatcccgcgccgggtggtttcgacttctggtaactcgggcatgtgtacctcttgaaggaaggatcagtgggcgcccagttcgcggatcgacaacttcatgctctcgaagtcgtagtccgacagccccacgtaatccagcaccaggtggccgatggcgttccactcatggtccaccgcctggttacccagcacgcggtaggacgagcagatgtgctcggccattttcaggatcgccagcaggttcttcaattgcgaattgcgcgctgactcatcactgaaaatcgccagggcgttgtggtggttggcgatggcgtcagtcacatgctgcggcaggcgccaggatttcgcggtgtagtagccaaccaccgcatggttggtgttgaacgcgttgttctcggtatcgaccacgcggcaatcggggccggcatttgcatacgcctgctccagcaccgacatgtagttggggaagcgcttgagcatcaacggcacgccacagtcgtggaacaggcccagggcataggcctcgtccaccgcctgggcgccggtgcgcttggccagggtgaggcaggtcatggccacatcctgggcggtgtcccagaagcggttgagggtgacgatggtgtcgtcgctcatctcgcctttgatcgacagcgcattgatcaggttgatgatcgagcggctgcccagcaggttcaccgcgcgctggatcgaagcgatcttgttactcaggccgtaatacgacgagttgacgatcttcagcaacgcgccggacaggcccgggtcctgggagatcagccgtgcgatcacttccaggtccggatcgggcatgtattgctccatctgcaaatccaccatgatttgcggctggggcggcacgctgatgccttgcagggcctgttggatctgttcggcggaaagctcttgggacataagtacacactctgggctaggcggggattctaacccctaagcaaacctgaccgacacccaaatgcccgattgaaaccggactaaatgtgggagggcgcttgctcccgatggcatcaccgccatacgtcagatacaccgcgccgcctgcatcgcgggcaagcccactcccacatgaaccgcgccgcaacaggtatactcccgctcttttttccggagcgacgtcatgtccctgccaagcctgcgtctcaaagccaacgccgatcgtcgtttgcgcaacggccacctgtgggtctacagcaacgaaatcgacgtggccgccaccccactccacggcttccaggcgggcgaccaggccatcctcgaagcggccggcggcaagaccctgggcatcgtggccatgagcccgaacaacctgatctgcgcccgcctgctgtcgcgcgatatcaagttgccgctggacaagtcgctgctggtgcaccgcctgaacgtcgccctgtcgctgcgcgatcgcctgttcgacaagccgttctaccgcctggtctacggcgattccgacctgttgccgggcctggtggtcgaccgtttcggtgacatcctggtggtgcagatcgcctcggcgaccatggaagcgcataaagaagacgtgatcgccgccctgacccaagtgctcaagccaagcggcatcctgttcaagaacgactccgccgcgcgcgacgccgaaggcctcaaccgctacgtcgaaaccgtattcggcctggtgccggagtgggtggcgctggaagaaaacggcgtgaaattcgaagccccggtaatccagggccagaagaccggctggttctacgaccaccgcatgaaccgcgcccgcctggccccgtatgccaagggcaagcgcgtgctggacctgtacagctacatcggcggttggggcgtgcaagccgcagccttcggcgccagcgaagtgttctgcgtcgacgcctccgccttcgccctcgacggcgtggagcgcaacgccgcgctgaacggctttgccgagaagatgacctgcatcgaaggcgacgtctttgaagcgttgaaagaactgaaagccagcgaagaacgcttcgacgtgatcgtcgccgacccgccggccttcatcaaacgcaagaaagacatgaaaaacggcgaaggcgcttaccgccgcctcaacgagcaagccatgcgcctgctcagcaaggacggcatcctggtcagcgcgtcgtgctccatgcacctgccggaagacgacttgcaaaacatcctgctgaccagcgcccgtcacctggaccgtaatatccagatgctggaacgtggtggccagggtccggatcatccggtgcacccagcgattgccgagacgcggtatatcaagagcattacgtgccggctgttgccgaatagctgatgccgttggcctgtaggggcctccgggttcctacaggctttcaggaagtttcgccccgcaccaggttttgactttcctctgctcaggctcgatcctcgaccccctcacggaatcgaggctcgcgcatgtcgacggcaatcacacaggctgaaaaacccttcattgttttctggctgatgaccatgaccctgctgggcgtcttcccgcttgacgtcgtgctgccctcctttcccgccctggcggaacacttctccacctccaccacccaggtcgcccgctcggtcagcctgttcgccattggcttttcatgcgccatgctgttgatcggcccgctgtccgacaggatcggccgcaagaagctgctactggccagcatgctcgtcgcaatcatgggtgcggccgggtgtttaaccgccagcacgactgcccaattcctgttctttcgcgtcatccaggccatgggttgcggcggtttcatactgtcccaagcgttggtgcaggaccttttcttcggcagagaacaagagcggttgcggatcgccatggctacggccgggggaattttcatttcggtttccccgctgctgggcgcgtggctgcaactgcacggggggtggcaagccagcttctatgtgtttatagcgctctgtgcagccaccctgatcatggctcaccggctactccatggcggcttgcctcaagcggcaccaagccgccaaagcatgttcaaggcctacacaaaggtcttcgccagccggcacttcgccagctatgccacgatctccgcgattaccttcgcctgtcatttctcgttcatcgttgtgtcaccgctgattttcatggaccagttgcagctgacgccccacgaatactcgttgaccctgctcctctacggcgccgcttatgtactgggcggtgtcagtgcgggcttcttgcacaagcgactaccggccgcgacccagatggccaccgggctggtgctgatcgcgatctcgggcatcgtcatgctggtcctcgcctatcagttcggcttatcaaccccgacggtgctggtgcccatgctgctctgcacagcaggcacgaccatcacccgccccatttccaattccaaggccatgagcttgtttccggacaatgcagggacggcggcctcagcggtggcggcagtgctattcattgccggtggtcttatcagtgcattcatcagcacctttacccaccatctgagtaccgcgctgggtctgtgctttctgatgctgagcgccgtcgccctggccctgaacgcatgggcgcggcgtcacccgcacgtcccgtagccgctatcttcacggtttcggtcattccctcccgccgccagcggtgtagaatcggccctattcatcgccagtcatcccccggcgggtttatgagctcgaggcccaagcacgcggcgatcccgcgacgcgagtggcaacttccggacacacggccatttttcgggtgttccagtagtgaaatagaagctcactcccctttagtacttgattagccgcccggagtgctccatgccagattaccgctcgaaaacatccacccacggccgcaacatggccggcgcgcgcgcactgtggcgtgccacggggatgaaagatgacgacttcaagaagccgatcatcgcgattgccaactcgttcacccaattcgtacccggccacgtccacctcaaggacctgggccagctggtcgcccgcgagatcgaacgcgccggcggtgtcgccaaagagttcaacaccatcgccgtggatgacggcatcgccatgggccatgacggcatgctgtattccctgccgagccgcgagatcatcgccgactccgtggagtacatggtcaacgcccactgcgccgacgccatcgtgtgcatttccaactgcgacaagatcacccccggcatgctgatggccgccctgcgcctgaacatcccggtgatcttcgtgtccggcggcccgatggaagccggcaagaccaagctcgcttcccacggcctcgacctggtcgacgccatggtcatcgccgccgattccagcgcttctgacgagaaggtcgcggaatacgagcgcagcgcttgcccaacgtgcggctcgtgctccggcatgttcaccgccaactcgatgaactgcctggtggaagccctgggcctggccttgccgggcaacggctcgacactggccacccacagcgaccgcgaacaactgttcctggaggccggccgcaccatcgtcgagctgtgcaagcgctactacggcgagaacgatgagtcggtgttgccgcgtaacatcgccaacttcaaggcgttcgagaacgccatgaccctggacatcgccatgggcggttccaccaacaccatcctgcatttgctggccgccgcccaggaagccgagatcgcgtttgacctgcgcgacatcgaccgcctgtcccgccacgtgccacaactgtgcaaagttgcgccgaacatccagaagtaccacatggaagacgtgcaccgcgccggcgggatcttctcgatccttggctcgctggcccgtggcggcctgctgcacaccgacctgccgaccgtgcacagcaagtccatcgccgaaggcatcgccaagtgggacatcacccagaccgacgacgaagccgtgcacaccttcttcaaggccggcccggccggcattccgacgcaaaccgcattcagccagtcgacccgttgggacaccctcgacgacgaccgtgaaaacggctgcatccgcagtgtcgagcacgcctactcccaagaaggcggcctggccgtgctgtacggcaatatcgccctggacggctgcgtggtgaaaaccgccggtgtggatgagtccatccacgtgttcgaaggccgcgccaagatctacgaaagccaggacagctcggttcgtggcatcctcgctgacgaagtgaaggaaggcgacatcgtgatcatccgctacgaaggcccgaaaggcggcccgggtatgcaggagatgctgtacccgacgtcctacctgaaatccaagggtctgggcaaagcctgcgccttgctcaccgacggccgcttctccggtggtacctcgggcctgtccatcggccatgcttcgccggaagccgcagccggtggcgcgattggcttggtgcaggacggcgacaaggtactgatcgacattccaaaccgctcgatcaacctgttgatcagcgacgaagaactggcggcacgccgggtcgagcaggacaagaaaggctggaagccggtggagaagcgtccgcgcaaagtcaccaccgcattgaaagcctatgccctgctggccaccagtgccgacaagggtgcggtgcgtaacaaagcgatgctcgacggcctgtaagcctcgcccatgaaaatgccccgccaagtgcggggcatttttttgcctggcgttctgacgctgtagtttttcatacgccggccgataacaggcgcatctgtattctcaaggaccttacccgcatggatgctcgctcttccgctctacgcccagctgcatgggcgctttccctattggcgttggccggttgcagctcgctgcaaaagcctcaggtggacccaggcctggcactcttcaacgaagccatgacactgccggcgctcgactacaccatcctgcgcaacggcgacagagtcgcgtactccgtcgatttgcagcaaaacccgatctctgtgcagttcgacgcctattgcacacaaggtcctggaaggatgctctaccccacgcgcacgggcctgcgggcatttactccctcaccggcaacaggcgtcgacctgccggcggcacaggcccaacaactgcagcaaagcgctcaattgcagagcgtatgcaaggcacgtcccgtgcccgactggcgggtgctgcaaacctctgccgatcagggctggctgctgatcgaccgtaacagcgtgcagcagcaaggcagtcagatatccgcctgggtcgcacaggattacctgcactatcaggtcgccaagaacgcatcgttgtttactcaacggcaggagcggctgaccctggattgcacacaacgcaccattacgttgatgagccagttcaacctcgatgaaacgcgccagatgatcaacggcgaaatccgtcgacaattcaagccgcaagccttggagcaagcttccggcgaacatgcccagctcttcaaggctctgtgccaggcgccgatggagctggcccagttacccgctttcaaggcgcgccaggcattgccacccgctgccagcgcaacgaatgccaacccagccgtactggcggccatccgagcgctcggcctgcctgcgccaacccgcaccctgagcgagctggcctacgactatgacgccgtgctcttcaacaacacccgcgtgggcgaccagaccaaacagacattcatcagtgtcgacaacgcatcgggtcagacgctggtacaaacacgcgactcggcacttggctttaaccaggagctgaccttccaaggcctgtttgatctggacagccaaggtctcgaccgcaaaaccggcagggacaaggtgaagacccgcctcttggttggcctgagctttcaaggcgattggcgtaacttgcccctcgccagtgaggtgggctacacccagacatggtcaaaatccatcaaccccgatggcagtccttcgccagagaacagcgagccaagaaccgtgacctgcaaggtcgctcgggaaatcccggctgccaccctcaccccggacctgaagggacaagccaaggtactcgactgcgttcagatgaaaggttggacttatcaggcagcctacctgagcgactatgggctgttcatcaaactgcatgagaacgcgttggttgcgcaatggaactggcatttgaaatcggtgaagtgaccccttgtataggcgccgggttctagaactgcggcttgtacgtcacgctgaacatcatgtttcgcgggtcgccgaagtagttgttgcctaccaactggctgtaggacgggatgtagtaacgcttgtccaagaggttgttgaagttcaccgccaaggtgacttcatcactggcatcgtaggcgactcgggaattgaaaattgcaaagccggcctggccaaagttgcggtcaaagctggtggtcgccgtctgtgcattgacccctgcacccaggctgacacggttgaaatcccccggtagtttgtaatcgccccagatccgcagcatgtgcttgggcaccgccgtactgaagaccttacccttcagttcggtgtctttcaaaaacaccgtggtgttgtaggtatagctactgctgacctgcaaacccggcgccaattggccgctgacctcagcctccagcccctggctgcgcaccttgcccgaggcggtggagcagtaccagccactgcaggcgtttggtccatcgatatcggtgctgaagtcagtgacggcgcggttttcgtggatatagcggaacagcgcaagggatgtattgagacgtccatccagcaactcccccttgatccccacctcatagttgcgcccttcgatcggcggcagaccggtcttttgctgggtcaactgggtttgcgggatgaacacctccgcgtagctgccatacaccgaccactggtcgtccagtgcgtacaccaggcccgcaaagggtgtgaccttgccattgctcttgaccgagtttttttcaccaccctcctgatactcacgggcatagtagttgtcttggtcgaaggcgaagtcgtaccaactggtacgagcgccgaggatcaatgtcagaggctccgtcaggttgatccgccaggtgccgtaaagacctttttgggtgatgtcataggtgctcaaggccaagttggcgcgatcagcaatgctgttataggtcggttgtggtcggtgatggtcgatggcaccgatatcggctcccggcgtgaacgcacgggcatagccgtcatccgtgttgtacttggaatagttgccccccagcaccaggctctgcttgaacgacagcgcttcaaaatctccgctgacataggcgtcgaacccgcggttcttgccatagaaatctgtggagtagtcagcgtagttaccgctgcgcgttgagccgaccggcaccgcacccacgataaattgataagtggcttcattggattcattcatcgccagcgcggaggcgttgaatttccagtgatcgttaaagcggtgctcaagatccaggtataccgccgtctgatcgttgaacgagcggttccaacttgctcccgtataggtcgaacgtgacacatccaatgcactgccatcggtgtgacgcggcaaggcgatcaaatacggacggccatggctctttttattgctgaaaccgacccccagggtcgtgtcatcgtccaagtcgaagtccagcgcgccgtacacggtctgctcccaattccacacgtagtcggtgaaggagtggcccttctcatagttgaccacggcgcggccacggatcgtcccggcctcgttcaatgggccgcccacgtccgcctgggacgcataccggtcccaactgccagccttggcgctcaaggttacagtcggtgcagcctggggacgcttgcgcaccagattgattgccccgcccgggctgttggcgccttgcagcaggccagcagcaccacgcaggacttccatgcggtcgtagatcaccatgttctcggtgatgtagctacccaacgcatacacgttacggggtaccggcacgccatcgtattgcagcgattcaatctcgaagccacgcgcaaacatgaacatcccgggccctggcgacttgaccgacgccatgcccggcaccgcttcaatcgcttgggtcagggtggttatgttctggtcatccatcgctttgcgggtcagcacactgaccgattgcgggatgtccttgagcttttgcgtgcccttgccgatggtcacggctccggtggtgtaagaaccgctgccttcggtggtcgtccccaagtggtcagcgctgatggtggtggcgccgacttcgagggcactgccagtgtctacgcgcttttccagggtgacggtgtcggcattgatgaacgccgcgctcagccctgtacctcccagcagcaagcccattgcctcgcgctgccccaagtgaccgctgacacctggcgacaccagcccctgggtcaactcaccattcaccagcacctgcacccgtgtcaccgccgaaaatgccgccagcgcaccgtccaggctctgccccggaatgtcgaatcggtaggtctgggcctgggtggtttcggcggcctgcaggtacagcggcgcagtgccgcaggccatggaaatggccagtgccagcaagggccgtgcggcgaatcggtgtgccatggatagtgctccccggtgcaaaaagtctgtgatcggcgccgcactacttgagagtgcttactatttacgcctcagtgatcaaggacgatggcttgcggggaaaccctgaaaatattttgcaaaagttgccgctaagaggctttgccttcgcgcaacaccagtaaatacggggtgtagtgctcagcgcgcaggttgagggtgtattccagcgctttgatcacggcctcgggtttgtcgatctcgaacacgccggacaccacgcgattacgcagcgaatcgcccagcaccagggtcgtgccaggccagtagcggttcaactcgctgaccacttccgacagcggctgttggcgaaacaccagttgtcgctggcgccaggcaaaaccgctggccgcatcgaaaccgtgcacctcggcaaggcgctcgccctgatattccacggcccgtcccggctccaggtagaccggctcaccggcgcccgcgctgacctgcaccttgccctgcgccacttgcacgcgcgtctgcgcatcccgccttgccacgctgaactgggtgccgaccaccttcacccagccctcgccggactgcaccacgaagggccgcgccgggtctttggtcacgctgaaaaaaccttccccgcgcaacaggcggatctgacgctcaccgccgctcatgcgtacctgaacagcactgtcagtgttgagctgcaactgggagccatcggccaactcgaccgtgcgcgactcgccggtgccggtggcatagtccgcgcgcaggcggtcgagccagggcgtgtgctgcacggtcaacccaaccgtcagcagcaccgcagcggcataagcccagcgccgcgcgggtttgcgccacgcggcctgctcggcgcggcggatcagccgtgccggttcacgcaaaccaccgagcatcgcctgcacttcctgccaggcgtcgtcctggggctggccctgcccgagccaggcggcaaaggcgtccatctcggccggggtcacgtcctcggcctgcaagcggaaataccaggcggacgcttcttcgaacaacacgtcgacagggggtaacgcagtcatgaccgacgtccttgtgtgtcgcaggcgagccgcgtcttgatgtaggcgcggcattcaatcaaggcgcgacgcagttggtattccacgctgcgtggggtgatcgacaggcgttcgccaatctcgcggtaggaaagttcgtcgacatgatagagcaggaagatctgccgagtcgcttcgggtaacgccaggatggcgtcctgcatcagtcgctcctgctggtaggcggccagttgttcgtcggcaccggggttgccgcacggcagctcttcgctgggctcgccggcatccaggcgctcacggcggatggcctggcgctggtgatcgcgcaccaggttgctggcgatggtgaagaggaaggctggcaggttgtcgatcttctcgccggaatccaggcgtgccaggcgcaggaacgattcctgggtcaggtcggcggccacctgagcgctgccggtgcggcgggtgacgaaggcttcgagggctttcttctgctccgcgaacaggcgcgcgatctgcgaattccaggaggacacagcactaccttgagaagaaccgagggttcaggaagtgcgcacgctagcagaggatgagattggttcgcaattgatatctatttttgctgtgacctttagggtgtcaatcagatagctatcgggggcaagccccctcccacagttgaccgagttcacactgtcgaaatgtgggagggggcttgcccccgatcaaagccacctcggacttattggatttcgtcaggcttgacgatcacccagttcttgtccgccgttaccggcaacccttccttggcctgcgccgccgcgtgcttggcgatcatgccgttgagttgggtcatgtacttgtccttgcggttgatccacaaatgcacgccgcccttggccacgtctacatcgtgaaacagcatgtagccatcgctggtcggggtgtcgccacccaccagtaccggctttttccattcgtcgatgtaagtgaggatcgccgcgtgcttgccggccatccaggtcgccggggtccacaggtagggcgtgagttccaggccgaggttggccttctcgtcatacttgccggcggtgatctgtttgcgcgcggtggtcagctcgccggtcttgcggtccttgagcagggtggtcacaccgatgacgttctcgggcttgacgttgtagccgtacttcggatcggcggcgaccatgcgcaccagctcttcggaagcagcggtcatcacgtagacctcgatgccgttttccatcagcttgttgtacagctcggcctggccggtgaagactttcggcggttgcacctcggacttcttaaccgcgtcaccttcgaaataggtaacgggcacgggcttgccagaggccatcagctcatcgacctgcaccttgagttccttgagggtgaaccccgagaacacctgggcaacccacgggtagcagaccatgtcgtccacttcgcagaggcggtagtagtagctgaacagactttccttatggtcggcggtgtctttgaacggcataagcttgagcgacggatcgaggctgtcgcgggtgatcaggcccttgttttccatgtagggcagcagggactcttcgaggtcatagcggtagctggtgttgtccatgtcgaacaccgcgaaattgcccttgttggcgttggcagcgatcattttgttcagttgctcggcggccggggccggccagtgtttcaactcggtggcggccatggttggtccggcaaggccaatgcacaacgcggcggcaaacaatctcgaagcgagcttcatatgcgtttctccctgagtgaaaaacatcgacgctaacaaatccctgtgacagttatcgcccgagcacgaccgcttgcgtcgtgatcgcgccaatggcatgtgcctgagcgtcaaaggcttattccaaaaacgacagtcaccattccatatcggtattaaatcaatatatttcaagctgttaggctttccggttcgcaatcgcaggctcgcgcgattggctgccttctcaacggagcttcaatgaatctgcccctgattctcaacttactggtgttcgtggccctgttgctgggcctggcacaaacccgtcgcacaaactggagcctggccaagaaggtgctgtttgccctcgtccttggcgtggtgttcggcaccgtgctgcacacgatctacggtgacggcaacccggtactcaaggcctccatcggctggttcgacctggtgggtaacggttacgtgcaattgctgcaaatgatcgtgatcccgctggtattcgcgtcgatcctcagcgccgtggcccgtctgcacaacgcctcgtccctgggcaagatcagcttcctgaccatcggcacactgctgttcaccactgcgattgcggcgctgatcggtatcggcctgaccaacctgttcggcctcaccgccgaaggcctggtggccggcacccaggaaatggcgcgcctgcaagtgatccagagcgattacgcgggcaaggtcgccgacctgaatatcccccaactgctgctgtcgttcgtgccggccaacccgttcgccgacctggcccgggccaagccgacctcgatcatcagcgtggtgattttcgctgcgttcctgggggtcgcggcgctgcaactgctcaaggatgacgtggaaaaaggccagaaagtcctcaacgccatcgacaccctgcaagcctgggtaatgcgtctggtgcgcctggtaatgaagctgacgccgtatggcgtattggcgctgatgaccaaagtggtcgccggttccaacctgcaagacatcatcaagctcggcagtttcgtggtggtgtcgtacctggccctgggcctgatgttcgtggtgcacggcctattgctgtccctggccgggatcaacccgctgcgcttcttccgcaaggtgtggccggtgctgacctttgccttcaccagccgctccagtgcggcggcgatcccgctgagcattgaagcgcagacccgccgcctgggcatcccgcaatccatcgccgggtttgctgcctcgtttggcgcgaccatcggccagaacggttgcgccggtctttatcctgcgatgttggcggtgatggtcgcgcctaccgtgggcatcaacccgctggacccgctgtggatcgcgaccctggtggcaattgtgaccttgagttcggcaggcgttgctggcgtgggcggtggcgcaaccttcgccgcgctgatcgtactgccggccatgggtttgccggtgtcactggtggcgctgctgatttccgtagagccactgatcgacatgggccgtacggcgctgaacgtgaacggttcgatgacggcgggggcgattaccagccaggtcatggggcagacggataaggcgttgttgaatgccgatgagcatgcggaattagcgcaagcctgatagatagcaatcgggggcaagccccctcccgcacttgactgggctcacacggtcaacatgtgggagggggcttgcccccgacgcttttaggctttttcccagacttcgaagttgtacgccggcttatcaccttcagctggattctccagattggaaaccaacttccactggccccgatcaaactctggaaaccaggcatccccctccgggctcaacgccacccgcgtcaaatacaggcgatccgcctgctccagcccctgcgcatacaactgcgcaccgccaatcagcatcagctcgtcaacaccttgcgccgttgcccattcctcagcgcgctccaccgcggcctccagagacggaaaaacttccgcaccttccagcgccagatcggtctgacggctaaccaccaggttcaagcgccccggcagcggtcggcccagggaatcccaggtcttgcgccccatgatgatcggcttgccgagcgtggtggccttgaagtatttgaaatcccccggcaaatgccagggcatgctgttgtcgacgccgatcacacggttttcaccgagggctgcgatcaggcttaaagggagagtttttttcatggcgacgagaataccagagccccgagccaggggttatgctccaggctcacaaacacgacaggacaacgcgtgactcctctgcacactctctggctgacagaaaccgtgcgcctgcgtgaagaacacgccggccccctggaagacctggaagccaatcgcctggcccgctcggcaggtggcgatctgccgacgcgtatccagcagcgtgccctgcacctggccgagcgcgatgggctcacgaccgccctcacccgctggttgcaaggcgcacgcctggcgctggtgctgctggcggtcatcgccgtgatcagcggcgcgggcctggcctttgccgcgctgggcaacgggctggtcccggtgaatgtgttctgggccttgggcagcttgctcggcttgaacctgatcctgctgatcagctgggccttgggcctgctgtttgccggtgaacacagcgccagcctcgggcgactgtggttatggctcagcgaaaaactcgcccgtgacgcaaaggctgcgcagttggcgcccgcactcctgctattgctgcaacgccagaaactcaatcgctgggccgtgggtatgctggtcaacagcctgtggttgttggcgttgctcagcgccctggtgattcttcttacgctactcgccacccgccgctacggcttcgtgtgggaaaccaccatcctcggcgccgacaccttcgtcgccgtgacccaggccctcggcaccctgcccgtgctgatgggcttcaatgtgccgagcgtcgagatgatccgtgccagcggcgattccgcgctgaatatcgaaagcgcccgccaagcctgggccgcatggctggtgggcgtgctgctggtctatggcctgttgccacgcttgatcctcgccctgctgtgcctgtggcgctggaagcgtgggcgcgccgcgctgcgcctggacctcaacctgcccggctacagccaattgcgcgagcgcctgatgccgagcagcgagcgccttggggtcaatgatgccgcgcccgaacaactgcatcacatcagcggcggcgtcagcgaactgcaaagcgacggcgcgctgctggtcgccatcgaactggacgaccagcattcctggccgcccaaactgccgcacaacgtgaagaacgccggcgtcctcgacagccgcgaatcgcgtaacaaactgctggagcaactcacgcgctttccgcccgcccgcctggccatcgcctgcgacccgcgccgctcgccggatcgcggcagcctggcgctgatcgccgaactcgcccgcagcgccaccgccacccgcgtatggctgctgcaagcgccgcccggccaggccctggacgccgaacgcctgggcgactggcatgccgcgctgcagcagcttgaattgccctttgccaactgcgcgccgctgaactggctggagaccggtcatgactaagcccctgaaactcgccgtggttggccacaccaatgtcggcaagacctcgctgctgcgcaccctcacgcgagacgtcggtttcggcgaagtgtcccatcgtcccagcaccacacggcatgtggaaggcgcgcgcttgtcggtcgacggcgaagccttgctggagctgtacgacacccccggcctggaagacgccatcgccctgctcgactacctggaacgcctcgaccgccccggcgaacgcctcgacggcccggcccgcctggcgcgcttcctggaaggcagcgaagcgcgccagcgtttcgaacaggaagccaaggtgctgcgccaactgctggcctccgacgccggcctgtatgtgatcgacgcccgcgagccggtactggccaagtaccgcgatgagctgcaagtgctggccagctgcggcaaaccgttgctgccggtgctcaactttgtcagcagcagcgaccaccgcgagccggactggcgcgaagccctggcccggcttggcctgcacgcgctggtgcgcttcgacagcgtggcaccaccggaaaacggcgaacggcgcctgtatgaaagcctggccctgctgttggaaaacgcacgaccgcaattggaacggctgatcctggatcaagaggcgcagagccaggcccgtcagcaaagcgccgcccggctgatcgccgaattgctgatcgactgcgccgcctgccgccgcagtgtggtcaccgaagatgagcaacacgccatcggcgacctgcgcaaagccgtgcgccaacgtgaacaaaagtgtgtggaggcgctgctcaagctgttcggcttccgcccgcaggatgccgccgccagtgacttgccgctgctggacgggcgctggggcgacgacctgttcaacccggaaaccctcaagcaactcggcgtgcgcgtcggtggcgggatcgccgcaggcgcggcggcgggtgccggtgtggatctgttggtcggcggcctgaccttgggcgccgccgccctggccggcgccattgccggtggcgcgctgcaaaccgcgcgcagctatggcagccggctgctgggcaagatcaaaggccaacgcgagctgaccgtggacgacagcgtgttgcgcctgctcgccctgcgccaacgccagttgctcaaggccctgggcctgcgcggccatgcggcgatgcacagcatcaaggtcgacacgcctcaggacaagacctggcgcgaaggcaagttgccggacgcgttgcacaaagcccgcgcccatccgcaatggtcgtcgctcaaccctcaccccaagctcagccaggctgagcgccaggaacaggtcgaagctctggcccggcgcctcgacgaaacctaagccgccagcacctgccgcgccttggccttgagcacctcgaggtcgagcaccggcacgtgcattgccttggcctgctcgtcccaatggcgcatgcgcaggctgatctcgcagagcgggtcttgatcaaacgcccgcgcttcttcctgggtcattacaccgccctggtacccgagcgtacggcgactggcttcgctcaggcgggcgtaatagtccggctggctgaaggtcaggtagcgcttggcttgcacgtgatattccaccagcttggccatgcgctcgctgaagcctgcacgacgcaggtaatcggcgccgagccgctcatggctgaccacgccataaccgcccatgttctcgccgccttcgccgcacaagtgcccgatatcgtggaaaaacgccgccagcaccacttcatcatcgaagccttcggccatggccaactgcgcggcctgggacatgtgctcgatctgcgacaccggctcgccaatgtaatccgctgtgccgtgttgctcgtacaagccgaagacttcgtcgatggtctgttcagaggtcatcacgccgccccccacaaggttgtgatattgcgttcggccatcgccggccccacgctcatgcccacaccggtgtgcatcaacgctgcactcacacccggcgccgctcgcaggaacgaaaacggcgccggcccgcgcgagccgtacacaccctgccagcgctccaccacctggatcttgcagcccagggtctgctcggccaactcgatcatccagtcatccacctgctcggcattgaacggcgatgcatcgctgccgtagtcatgggagtcaccgatgatcagttcgccatggggcgtggggctgatcagcaaatggatgccgtgttcgtgcaggtgtggcgcttcacgcaggatctgcgcctggatcggcgccgcttccgggagatcggcgaaagcgccgtagtgcacgcagctcaagccggtgagcaaggcgtgttgcaggttcaggttcaccgctggccgcgcgcgcagcatttgcaggcgacagatgctcgggttgagttcggccatcgcttcggccagcagagtctggtagtcgtggccggagcacacgatgatctgttcagcgcgaaagctgcctgccgtgctgtgcaactggcccggttcgacgtcgcgcaccagggtggagaagtagaactccacgttcagctcttgcgccaggtagttgatcagcgccgggatcgcttcacgcgaatacaactgctggtcatccttgccgtgcaacgcggcgcggtgatggcggaactggccgccgtacaggtccttcatcgcggagccttgcagcaactcgacgtggtagccgtgctcctgcgcacggccagcgcagaacgcttccagtagatgctcttcggcttcggtacgggcgaacaggtatgagccgttgcgcttgagttgcagcccggccacctgcgcccaatggccccagatttcgcggctttctcgcgccaggtcgagcatcggcccaggtggttgaccggtcaccagggcctggccgaagttgcgcaccgaggcgcccagcggcgtggcgctgcgttcgaagaccttgaccttgaggccgcgcctggcggcggcaaaggcgtgggacaggccgaggatgccggcgccgatgatcagcaggtcgctgtggtgtgtcatatcgtgatgtcctgttttgcagaccgccatcgggggcaagccccctcccacagttcgatttgcgaatgccatcagtgtgggagggggcttgcccccgataaggccagtagccccaacgaaaaaccttactgcgctgccactttctccgacttgccgtcatagcgcttgcgccattcggtcaggatgctgtcgcggttcttcgacgcccaggcaaagtcgttcttgatcaagcgctgctcgtagtcggccggcaattcggtctgcggcttggcgatgcccggctgggcgagcacggcaaagttgtccttgtacaggtccatggccgccgggctggcggagaagtcggcgagcttctgcgcggcgtccttgtgcgcggtgcctttgatcacggcggtggcttcgatgtcccagcccaggccttccttcggcaggatgatgtccaacggcgcgccctggcgtttcagctggacggccgggtattcaaacgaaatgccgatcgggaactcaccggaagccgcaagcttgcacggcttggaaccggagtgaacgtactggccgatgttctggtgcaggtcgtccatgtactgccagccctgcttctcgccgaaggtctgcaaccaggcgctgacgtcgaggaaaccggtgccggacgaggccggattgggcatgacgatcttgcccttgtactcaggctttgtcaggtcctgccagctcaccggcttggtcagcccctgtttctcggcttcgacggtgttgaagcagatggtcgcggcccatacgtccatgccgacccaggccggagggttggcggcgtcgcggtagtgcttgccgatcttgtccaggtccttcggcgcgtagttgtccagcataccttgctggtcgaggatcgccaggctggacgcggccaggccccagactgcgtcagcttgcgggcggtctttctcggccagcagcttggcggtgatgatgccggtggaatcgcgcacccacttgatctcgacgtcggggttagcctgttcgaaggcctttttgtaggtcttcaattgctcggcttcgagggccgtgtacacggtcaactcggttttcgcggcaaaggcattcacgctgaatgccgtgagtaccgccgcgaccagcgccaggggcttgaacatggaacacctccttcaggattattggccgggcgcggtctggcgccaggcttgggagcggcgcagtgcgccacgtgaggcccacgccagcagcagcgagacgccggccgacgtgaacaggatcagggtcgacatcgccgccgcaccgcccacgttgccggcgtcgtccatgttcaacacggcgacggcggcgaggatggtgtcggggctgtagaggaagatcgcggcggacacggtggtcatcgccgacacgaacaggtagcgcacgatatccagcagcgccggcaggcagatcggtaccgtcactttcaggtaatgccggtacagcggtgccttgagggacagcgcggcggcttcgaactcggcgtccagctgacgcagcgccgtggtggcggtcatctgggcggtggtcaaatagtgcgcaatggtgcacaccaccagcagggtcatggtcccgtagaacacatgcagcgggttgccgttaaggttgaaaaagaacacgtagcccaggcctagtaccaggcccggcacggccatcggcacgaagctgagcatgcgcagggccaggtttaggcccttctggcccttggttttttccatcaggtaggcgccggtgaagatcagcgcgctgccgatcaatgcggtgcacagggccagggtcaggctgttgcgataggccagccagccgccgccggccgtgtcttcgaactggtaatggttgagggacagcgacaggttgtacggccagaatttcaccagcgaggagtacaccgccatgccgaacaccagcagcaacaccgcgcagatcagcagcacgatggccaggtagcaggcatctctcaggcgcgagggcaccggttgaaacacttgtgcacggccgctcatcgaatcgccgtgacgacggcgcagccaggcatccaccccaaagctgagcagcgccggcagcagcaacaccatgccgatcagcgcaccgcgcccgaactgctgctggccgaccacggccttgtaggcttccagggccagcacctgataatcgccccccaccaccacgggcacgccgaagtcggtgatggtcagggtgaacaccaggcaaaacgcggcgaacaccgcctggcgcgtggccggccaggtgatgctgcgaaacgcccgggccgggctggcgcccatgctggaggcggcatcgaacaggcgtgcatccgccagggacaacgccgacagcagaatcatcaaggcatgtgggaaggtgtagatcacctcccccagcacaatgccccagaaaccgtagatattctccgagagcaacccacgcagcatgccctggttgccaaacaggtagaccagcgcaatgcccggcagcatcgacggcgccatcagcggcagcagcgacataccgcgccagatcgccttgccgggaatcaaggtgcgttgcagggcgtaggcaaacaggtaagccagcggtacgacgatggctgccacgctcagggacactttcaggctattgcccagcagccagtggaagttggcgctggtcaccagctcccgcgccgccaacaggccaccgccctgcccggcctcgctgctgaaaccgcgccagaagatcgccagcaacggcatcaatacagcgatacccaacagcaacagccacagcagtttgccgccgacgacgaaaattctgtcgccggtttcggcgcgggaaacctggcgtggcagcgtcatgacagcggccatctcaggcaaacacctgcaggctgcgcggcggcaaggccacccagatgtcctgggcgcccaggcgcggcatggcttccggggccagttcggcgagcagcgggtggccgggcaattgctccagttcaaagctcatgcggcagcggttgccaaggaaggtgatctcgcgcaccttggccgggaacaggttttcttcatgcaccggcgggttgacgctgatcgcctccggacggcagaacaggcggcccgacttggccacgccagcatcgtcggccaggcgcatgttcatcccgccgacctgggcgtgactggcactgttgcggctgaacggcagccaattgccctggccgacaaactccgccacgaacggcgtggccgggcggtcgtagatctcctggggcgtggcgtattgctcgacctcgccgttgttcatcacggcgatgcggtcggccatcagcatggcttcgtcctgattgtgggtgaccatcagcgtggtgatgcccaggcgccgttgcagttggcgcagctcggtgcacagatgctcacgcacgcgggcgtcgagggccgacatcggttcgtccagcaataacaatgaaggcgcgggcgccaaggctcgggccaaagcgacgcgctgctgctggccgccagacagctggccggggtatttcttttcgctgccgaccaggccgaccagttcgagcatctggccaacacgctggcgcacttcatcacgaccactgccggtgaggccgtagccgatgttcgcttcgacggtgaggttgggaaacaacgcgtaggactggaacaggatgccgtagtcccgcgcctggggcggcagccgggacacatcgcggttgcccaggtaaagctcgccactgtcctggcgttcaaggccggcgatgcagcgcagcaaggtggtcttgccgcaaccggacgggcccagcaggcacaccagctcgccggcggcgacgtccagcgagacgttatccagcgcggtaaacgcgccgaagcgtttctggataccgcgcaccttcatgggcgcgccgggttgggtcagggctgtgttcatgcaaggcacctcatcgaacggatgaaggccatgctaggggggcaatgcgtccctggtgtggcagaaaggcaaaacccggtgatagtggtattggtggatttgggtagggctctcagcgctgagttgcctggtctatcgctatcgggggcaagccccctcccacattcagagcgtgtgaacccgaaaaagtgtgggagggggcttgcccccgatgaggcccgaaaagccaaccaaaaacttaaattggcgacatttcctgcgccagcccaagaaaggccgccggcaaccgcgcgccctttctttccttgaggcagtacagatactcaggaatctgcggtgcattctcgatggtcagcacgcgcaattgcggatcgtgtggcacttcttgccgcgcaatgatgctgatgccaatgttgcgcagcaccgcttcacgaatcgactcgcggctgccgatttccagcagcggtccgaagctcacacctgcgctctgcaacagttcttcggtcaaacgtcgcgtggtagagcccgcctcacgcatcaacagcgtgtgcccggccaatgcgttgagcggcacatggtcgagcttggccaacggatggttgcgatgcaccgccagcaccagcgggtcggtgcccagcacacggcgaatcaggcgtgggtcttccagcagttgcgaggaggcggcgacgtcgacacggtaatcgtccaaggcttctagcacttgttgggagttaccgatttccaccgacacttccacttgcggcaggcgttcacgaaaggctttgaccaggtcgaggatgtagtacggtgccgtggcggcaatcctcagtgcaccctggacctggccattgttgcgtagaaaaaattcgatgtcggcttcttgctgcaacagcgccttgaccatcggcagcagccgcgcgccctcgtcgctgacggtgaggcgacggccgccacggtagaacagctcaacaccgtattggctttccaggttacggatctgggtggtgaccgtgggttggctcaggccgagttttttcgccgcctgggtaatgctgcccaggcgggcgaccatgaaaaaagccttcaactcggcactcagcacaccaccctctcatcgtttatttgcgcaacaggcgcaggccattgaacaccaccagcaggctcacgcccatgtcggcgaacaccgccatccacatggtggccatgcccaggaaggtgaccgccaggaagatcgccttgatcaccaatgccagggcaatgttctgcttgaggatactcgacgtttgccgcgacagacgaatgaaagccggaatcttgcgcaggtcatcgtccatcaaggccacatcagcggtctcgatggccgtgtcagtacccgctgcggccatggcaaaacctatctcggcgcgagccagggccggagcgtcgttgatgccgtcgccaaccatgccaacgcggtgaccttggccgtagagggtttcgatggcttgcagcttgtcggtcggcaacagatcaccctgggcctggtcgatgccgacctgggcggcaatcgcctgggcggtgtgggtgttgtcaccggtgagcatcagagtcttgatgcccagttcgtgcaactgctggatggcttctcggctgctgtccttgaccgtgtcggccacggcgaacagcgccagcgggccggatttgtcgagcagcaacaccacggatttgccttgtttttccagggcgaagagtttctcttccagctccggcgagcacaggcccaggtcttccaccagtcggtggttgcccaggtggtaggtttcgccgttgatctcgccacgcacgccgcgaccggccagggccacgaagttatccacaacgtgggtgggcaggtttttatccacagccgcgttggcgatggccagcgacaccgggtgatcggaacgccccgccaggctggcggccagcgccggtgcgctgtcttcgacgttggggaacagcgccaggtagtcggtttgcaccggtttgccgtgggtgatggtgccggtcttgtcgagggccaggtagtcgagcttgtaaccgccctccaggtacacgccgcccttgatcaggatgcctttgcgcgccgctgccgcgaggccgctgacgatggtcaccggggtggaaatcaccaatgcacacgggcaggcgaccaccagcagcaccagggcacggtagatccagtcgaaccaggcgccggccatgaacagcggtgggatcaacgccacgcccagcgcaaacaggaacaccgccggggtgtagatcttcgagaagctgtcgacgaagcgctgggtcggtgcccgggcgccctgggcctgctccaccgcgtgaatgatgcgcgccagggtggagttgttggcggcggcagtgactttatattccagggagccggcctggttgatggtgccggcgaagactttgtcgcccacggtcttttcaatcggcaggctttcaccagtgatcggcgcctggtcgatggtggattggccagcggtgacttcgccgtccaggccgatgcgctcgccaggctttacccgcacgatggcgccaagatcgatactcttgacctcttgttcagcccaagacccatcagcctgttgcacggtggcctgctcgggcgtcatttgcatcaagccgctgatggcattgcgcgcacggtccagggacttggcttcgatcaactcggccacggtgaacaggaacatcaccatcgccgcttccggccactggccaatcaggatcgcaccggtcaccgcaatgctcatcagggcattgatgttcaggttgaggtttttcagggcaatccagccctttttataggtggtgaggccgccgctgaggatcgacaccagcgccacgatggcaatcacccaggtcggcgcggcgttagtgaagtgcagcacttccgccgccaacgcgccgatgccggacaacgccagcggccaccaatgtttcttggcgggcggttcggcggcgggggtgccttcttcgatgggatcggcctgcatgcccaaggacttgatggcgtcgatgatcggcgcggtactcggcaggtcgtgggtgacgccgaggatgcggttgatcaggttgaattccagctgctgcacacccgcaagcttgcccagtttgttctggatcagcgtctgctcggtggggcagtccatggcttcgatgcggaaggtgctcagccgcgaaccggcggtgggcgcttcgctcaattgcaccaatgccggggccggcgtgccggagcagcaggagccgccgtggccgtggtcatgcacaggggtcaatttcttcgggccatgatcatggtcgtgatcgtgcttgtgcggggtgtggatggaatcgctcattctgtcgcgtccgtaaaggtgcctgttgccaagtaaagaccctgtagccactatagggtcaagcacccatttggagattgttgcgatgaagatcggcgaactggccaaactgaccgactgcccggtggaaaccatccgttactacgagaaggaaggcctgctgccgcccccggcgcgcaccgacgccaactaccgcgtatacacccaggcacacaccgagcggctggtgtttatccgcaattgccgcagcctggacatgaccctggaagaaatccgcagcctgctggggctacgggacagcccccaggaccagtgcgaaagtgtgaatgcgttgatcgacgagcatatccaccatgtgaaggcgcggatcgatgggctgttggtgttgcaggagcaattgctggacttgcgccaacgctgtggcggcggggatcagtgcgggattctgcagcggctggaagtcagcggcagtgtgttggccagtgaggctgagccttcccatgtgggcagaagccacggccattaactcaaacgaagacggttcaaatgtgggagggggcttgcccccgatggggagttccagccacccaatacttagctgatccaccgctatcgggggcaagccccctcccacacaagccacaccttaagaccaggacagccttcagatcgcgacgtcggccttgatgcttgggtcggcgtcgtagcccacgatctcgaagtcttcgaacttatagtcgtagatcgacgcaggtttgcgcttgatcaccagctccggcagcttcttcggcgtgcgcgccaactgggtgcggatctgttccatatggttgctgtaggcgtgggtgtcgccggtggtgacgatgatctcgtgggggatcaggtcgcactgctgggccagcatatgggtgagcaaggccagcgcggcggtgttgtacggcaggccgaggaatacatcggagctgcggatgtacaactgcatcgacaggtgaccgtcgtgcacgaacgcctggtacagcaggtggcacggtggcagggcttgtttgccgttgcgcgcgttttcctgcgggctctgggtttcgtcgggcaggtactcgacgttccagccgtggaacaggatgcggcggctgttggggttggtcttgagggtgtggaccatgtagtcgatctggttgatcgtgccgccgtccttggttggccaggccgtccactgctcgccgtacaccgggccgaggtcaccctcttcggtggcccattcgtcccagatgcgcacgccgttttcgttgagccacttgatgttggtgttgccgctcaacatccagatcagttcattggcgatacttttgaagtgaagcttcttggtggtcagcagcgggaagccgtcggccaagttatgccgatactgacgggcaaacacggccttggtgccggtgccggtgcgatcgcccttggtcaatccattggtcacgacgtcgttcagtagctcgagatattgcttcatgtgggtacccgtatcgttgaagcccaggccagataaagacctgggcattcgaatttaaagcgcggtgttcttcaaaggttgcgggcgattgtacgcccaccacagcaggcccaggccgccgatgatcatcggcaggctgaggatctggcccatggtcacccaaccgaacgccagatagcccagttgcgcatccggcacgcgcacgaactcgacgataaagcggaagatcccgtagaacagcgcgaacatgccggaaaccgccatggtcgggcgcggtttgcgcgagaaaatgtagagaataaggaacagtgccacgccttccaacgcgaactggtaaagctgcgacgggtggcgcggcaattgcgccgggtcgctgaacggcgggaacaccatggcccacggtacgtcggtcggcttgccccacaactcggcgttgatgaagttgccgatacgcccggcgcccaggccgatcggcaccatcggcgcaacgaagtccatcagttggaagaacgacttgccgttacggcgaccgaaccaccaggcggcgatcatcacaccgatgaacccaccgtggaacgccatgccgcccttccacacttcgaagatcagtgtcgggttggcgatatacgccgaaaggtcgtagaacaacacatagccgagtcgtccgccgacgatcacccccatcgacagccagaaaatcaggtcggagagtttctccttggtccaggtcgggtcgaaccggttcaggcgtcgggaggccagaaaccaggcaccgccgatgccgatcaggtacatcaacccgtaccagtggattttcagcggaccgatggccagggccaccgggtcgatctgcgggtaaggcagcattgcgactcctcgttaaatcattcgttaggcgtgcggaccatgccggtgtgcgattaagcctgcgttacagccgctgtttcaaattaagaagttcacacgcaccgaaacgccaggcatgttaacggatggaaggcgtgccgcccaacttcgatacgatggaacgcctgccgctgtatgagtagagtgacaaaaaacacaaaagggatcgcctgatgtgcctgattgtttttgcctggcggccgggccacgcccagccgctgatcgtcgcggccaaccgtgacgagttctacgcccgccccagcctgccgctggcccagtggccggatgcgccagaggtgtacgccggtcgtgaccaggaagccggtggcacctggctgggcgtgaatgccgatgggcgctttgccgccctgaccaatatccgcgacccgcatcagccgccggcccgtaagtcacggggagagctggttgcgcgatttctcaacggttcgctgccgattgatgagtatttagccgacgttaacggccgttcaattgaatatgccgggtttaacctgctggtgggcacgcgggatgagctgtggcattacaacgccaatcacaccgagcccacgcgcttgaaggccggagtgtatggattatccaatgcggggctggatacgccgtggcccaagttgctcaaggccaaggcggcgttgggcgaagtattggcggacccgcagccggaggccttgctggaaatcctgagtgatccgcagacggcaccgtttgccgatttgccggataccggcgtggggttggcgacggagagcctgctgtcgagcgtgtttattgccagcccgagttacggcacgcgggcgagcacagcgctgatagtgaatgccgacggaacgcggcggatggtggagcgcagttttgggccgcatggtgggcggctgggcgaagtcgaaatcaacctataaccacaccgaaacccaatgtgggaggggcaagccccctcccacatttttaaagggttttggcagacgccgggttgatcatccgcgtcagccccaggttcttcagggccaactgcaacgagctgtggataacttgcgggttgtcgatagtcatcaactccgccagcagctccttggccatgctcagttccacctggcgcagcatccatttcaccttcggcaagttggtggcgttcatcgacaggctgtcaaagcccatcgccatcaacaacactgccgccgccgggtcaccagccatttcgccacagatgctcaccggcttgccttcggcatgggcgtcgcgcaccacatgttgcagggcttgcagcaccgccgggtgcaggtagtcgtagaggtcggccacccgtgggttgttacggtccacggccaataggtattgggtcaggtcgttggaacccactgacaggaagtccacctgccgtgccagttccttggcctggtacaccgccgccgggatttcgatcatcacaccaatcggcggcatcggtacgtcggcgccttcgtcgcgtacttcgccccaggcgcggtggataagatgcaacgcctcttccagctcatgggtgcctgaaatcattggcagcaggatgcgcaggttgttcagaccttcgctggccttgagcatggcgcgggtctgtaccaggaagatttccgggtggtcgagagtgacgcgaatgccgcgccagccgaggaacgggttgtcttctttgatcgggaaatacgacagtgacttgtcgccgccgatgtccaggctgcgcatagtcaccggcaacgggtggaaggcctgcagttgctcgcgatagatcgccagctgctccttttcactcgggaaacgctggttgatcatgaacggcacttcggtgcggtacagccccaccccttcggcgccgcgctgttgcgcacgggccacgtcggcgagcaggccggtattcaccagcaacggcacacggtgaccatcggtggtcacgcatggcaactcgcgcaatgaatcgaggcccagcgccagttgcttctcttcctcaaccacttcggcgtattgcttgcgcagcacttcgctggggttggtgaacacttcaccgcgatggccatcgacgatcatgtcgataccatccaccttggaatacggcaggtccaccaggcccatcaccgtcgggatgcccatggcccgggccaggatcgcgacgtgggagttacccgaacccagcaccgagaccaggccaaccagtttgccttctggcacttcgccaagcatggtggcggtcagctcttcgctgatcaggatggtgttgtcggggtagaccaggttggtggtgcgatcttcctgcaggtacgccagcagacggcgaccgaggtcgcgcacatccgaggcccgttcgcgcaggtaggcgtcgtccatcagttcgaaacggttgacgtgatcggtgaccacctggcgcagcgcgccctgggcccattggccggtcttgatcacggtcttgacttcattacccagcgacgcgtcgtcaagcatcatctggtacacgtcgaacagcgcgcgctcttcggggcgcagttgggtggccagcttggtcgacaggttgcgcatgtcggcgcgcacgccttccagggcggtcttgaacaatttgatttcagcgtcgatgtcggtgacggtcttgtccggcaccacgtccagatccgccggcggcagcatgaccaccgccgtaccgaccgcagcgcctggcgaaccgggtacaccaacgaacttggcttcctggatacccttgccttcgcgccccaggccgcgaatcgagccggtggcttcggcgtgggcgataaccccggcgagttgcgcgctcatggtcacgaggaaggcttcttcaccttcgtcgaattggcgacgttctttctgctggatgaccaacacgccgacgacgcggcggtggtgaatgatcggcgcaccgaggaacgaggcgtaacgctcttcaccggtttcggcaaagtagcgataacgcgggtgatcggccgcgttttcaaggttcaggggttcttcacgcgtccccaccaggcccaccagaccttcattgggcgccatgctgaccttgccgatggagcgcttgttcaagccctccgtggccatcagcacaaaacggttggtctcggggtccagcaggtaaaccgagcagacctggctgcccatggcttccttgacgcgcaacacaataatccccaacgccgccttgagatccttggcggagttaacttcctggacgatcttgcgcagcgtattgagcatggctcggggtcgaactccgtcgtcagtcgcgcgctaaaaggcgcggggcaagctctttgagcgcgcgacgataaacctcgcgcttgaatgtcaccacctggcccaacggataccaatagctgacccagcgccagccatcgaactccggtttaccggtcaaatccatccgcacccgctgctcgttggagatcaggcgcaggagaaaccatttctgcttctggccgatgcacagcggttggctgtgggtacgcaccaggcgttgcggcaaacgatagcgcaaccagccacgggtacaggccagaatttgcacatcttcgcgctcaaggccgacttcttcgttcaactcgcggtacaaggcgtcttcaggggtctcgtcggggttgattccaccttgaggaaactgccaggcatcttggttgattcggcgagcccatagcacctgtccggcatcattcgtaagaataatcccgacattaggacggaaaccatcggggtcgatcacggcaacaacctcgcaaacgcatgtcgccgcattgttccacaaaggttgatgaagcggcaacgaggcttcgtaccttatgtgcactcttgtgaaaagaccgtattctggacgcctttttacagacttttcagcgagtaactgcaatgcgcctggctttattcgacttggacaacacccttctcggcggtgacagcgatcacgcctggggcgattacctctgtgaacgcgggattctcgacccggtggcctacaaggcccgcaacgacgagttttaccaggactacctggccggcaagctggacaatgccgcctacctgaacttctgcctggagatcctcggccgcaccgagatggcccagctggacgagtggcacaacgactatatgcgcgactgcatcgagccgatcatgctgccgctggccattgagctgctggccaagcaccgcgccgccggtgataagttggtgatcatcaccgccaccaaccgtttcgtcaccgcgccaattgccgcacgcctgggcgtggaaaccctgatcgccaccgagtgcgaaatggaaaacggccgctacaccgggcgcagcaccgatgtgccgtgcttccgtgaaggcaaggtgacgcgcttgaaccgctggctggaagaaaccgggtacagccttgaagacagctacttctatagcgactcgatgaacgacttgccgctgctggagaaagtgactcacccggtggcggtggatccggatccgaacctgcgggccgaggccgagaagcgcggctggccggtgatcacgctgcgcagctgatgaagccatcgggggcaagccccctcccacacttgatcgggttcacacggtcaaaatgtgggagggggcttgcccccgatgcagacgactcggtccaaagccttaaaccggcttggcgcccatcagaccggcaatcgccacaaaccccaccagactgaccaccgccagcaccagcgtgaagttcaggctaccgccctcgcctttgcccaggcgattgagccgcgccaccagccagaaccaggccagcgccgccacggtatagaggatgctggagcccaggatccaggtctggcccagcggccagcccaccaggtgcaccagccaccagccggtaaacggcatgctgaccacgcatacgcccatcagcaaccaaacaaaggcccacgggcgttgcacggtcgccgccgggccggcgctgcgtttgcgccaggccagcagcgccaggccaaggccactgagcagcaacaccacggtggctgccatgtggataactttcagggtggtcagggtttccatgtgtcgttttccttaaaggccgccccctcagcgtagtcgctcaaccgaggaacagtttgtaggccgggttatggctttcatcccagtacgggtagccgatggcttccagggcggccggtaccaggtgacgttcatccgccggcacttgcagcccggcgaccacacggccgtctgccgcaccgtggttgcgatagtggaacatcgagatgttccagcgcccgcccaatttgttaagaaagttgaacaaggcccccggacgctccggaaactcgaagcgcaacaccacttcatcgctaaccttggccgcatgcccgccgaccatatgacggatatgcaacttggccagttcgttctcggtcaggtccagcaccgggaaaccctggctggtcaggctggcgatcagggcactgcgcggatcgttttccgggtgggtctgcacgccgacaaagatgtgcgcctcgctgccggagtggtagcgatagttgaattcggtgatctggcgtttacccacggcctcgcagaacgccttgaagctgccgggcttctcggggatggtcacggcgatgatggcttcgcggccttcacccagctcggcgcgctcggccacatggcgcaggcggtcgaagttgacgttggcaccggagtcgatggcgaccagggtctgcccggtgacaccacgggtttcaacgtacttcttgatcccggccacgcccaaagcccctgccggctcggtgatggaacgggtgtcgtcgtagatgtccttgatcgccgcacagatctcgtcggtgctcacggtgatcacttcatccacatagtccttgcagatgtcgaaggtgtgctggccgatctgcgccactgccacgccatcggcaaagaggcccacagtcggcaacaccacgcgctcgccagcagccatggcggcttgcaggcagttggagtcgtccggctcgacgccgatgatcttgatctccgggcgcaggtatttcacgtacgccgcaatcccggcgatcagcccgccgccgcccaccggtacgaaaatcgcgtccagcggccctggatgctggcgcaggatctccatcgccacggtgccctgcccggcaatggtgtgcggatcatcgtaggggtggatgtagacgtagcctttttcgtcgaccagtttcagcgagtaggccagggcttccgggaaggaatcgccatgcagcactactttgccgccgcgggagcgcacgccttcgaccttgatttccggcgtggtcttgggcatcacgatggtggccttgacccccagcaccttcgccgccagggccaggccctgggcatggttaccggcagaagccgtgaccacgccgcgcgcacgttcttcggcgctcagttgggtcagcttgttgtaggcgccgcgaatcttgaacgagaacaccggctgcaagtcttcacgcttgagccagacctggttgcccagccgctcggagagctggcgggcggtctgcaacggggtttctacggcaacgtcgtaaacgcgcgaggtgaggatctttttgacgtactgttcaagcatcggcggatatcactgggcgggttgggcagggccaaggagtctaacccagcgtttgggcgggcgaccacacgaatccagaggttttgttgggttatactcgcgcccctcgataactccccgcccgttccggagcccgcatgacccaggatcaactcaaacaggcagtggcccaggccgctgtcgatttaatccttcctaaactcgacgacaagagcatcgtcggtgtcggcaccggctccaccgccaactgctttatcgatgcactggcccagcacaaaggcgcgttcgacggcgccgtggccagctccgaagccaccgccgcacgcctcaagggccacggcattccggtgtacgagctcaacaccgtgagcgacctggagttctacatcgacggcgccgatgaaagcgacgcgcacctgaacctgatcaagggcggcggcgcagccctgacccgcgagaagatcgtcgccgccgtggccaagaccttcatctgcatcgccgacgccagcaagctggtgcccgtactcggcgccttcccgctgccggtggaagtgatcccgatggcccgcagccacgtggcccgcgagctggtgaagctgggcggcgacccggtgtaccgcgaaggtgtgctgaccgacaacggcaacatcatccttgacgtgttcaacatgcagatcaccaatccggtggagcttgaaactcagatcaacgcgattgtcggcgtggtcaccaacggactgttcgcggcgcgtccggccgatgtgctgctgctgggcaccgccgaaggcgtcaagaccctcaaggcctgagaacaccgctgagctaaggtgggagggggcttgcccccgatgagggagtgtcagtcaacggatgcttggctgatacaccgctatcgggagcaagccccctcccacattggttcagcggggcttcttgaagacgtagaacaggttcggctcgctgacgaggtacaacgcgccctcgtcatccatggcgatgccttcggcctgcggcactcgcttcgtcaggccatggcgcccgttgagcagtgacagactgctcagcgggcgaccgtcgatatccagttccagcaccaggaacgactcatccgacagcgccagcagatggccgctgcgctcatcgtattgcaggctcgacaggtcacgcacaaacaacccggcgtcgcgcttggggttattgatcacgtgcaccgagtaggttttttccggtttgaaatgcgggaagccatgcacctcatagatcagcatcgggtcgcgctccttggccacgaacaggcgcttgcccaccgagtcgtaggccaggccttcaaagcccttgttgccaccgacatgcacacccagggtcatctgctccgcatcagcggcgtcgaggaattgggtatcgtcgtccacgtgcaccttgatcagccgctgctggcgctcatcgctgatgacatagatgttgtcgctgatgaactccacggcttcggcatcgccaaacccgatcaaggggatgcgtcgcaggatcttgccttccagggacaactcgatcagctcggcgtttttattggtgacggtgaacaggcttttgcgcaccgggtcgtaggttagggccgacacatcgtcgtcgagcccctcaatggcctgagcctcaagcgtgacgcggtagtccgccagcccgatggagcgttcgtccgctggctggcgccatacctgccaattgaaccaggtgcgttcaaacagacgaaaatgctgcgcaacggccccggcgctgaccagggtgatcagcgcaagcatgataaacaggggtttggggcgggctagtcgttgcatcgggcgggctcaaagtcaaaagtggcgaatgaatatcacgcccgtctgaatttaaacttaaacacgcccggatgtctggcagatgccgctcacagagacctatctgacgtaatcggtgtgctatttctgcttttcgaaccggtagaacagattgggctcactgacgatgtacagcgtgccctcctcgtccatggtcaccccttcggcacggggaatggtgtgcttgatgccgttgaaaccgccgagcaaggtcatgaagctgacttgctggcccttctcgtccagctccagcagcaggtgggagtcggccgacagcaccagcaaatgcccggtacgcgggtcaacagccagggccgagagattgcgcatgtccagttctttgctggccagcttttgtttatcgcccgccagggtcaagccgccgtcgcttttccaggtgaacaacgcgggcgggcgctcttcgccaaggatcaactgctggttgcgcttgtcccaggtgatggcttcgaaggccttattctggtccttggacgggccgaggtcatagctggtgaagtcggccttgttcagttgggtggtgctcgcatcgaccttgacgatggtcagggtgtgctgccgctcgtcgaccaccgccaacaggccattttccattaccgtcacgccttccgggttgtcccagccgttgagcggcatcttgcgcagcacatcgccttgcaggctcaactccgccaggaacgggtttttgcccatcacggaaaacagggttttggtctgtggattgtaggcaacgtccgacgcttcgtccttctccatccccggcaaaagcttgccatcgatgaccgcatggtagtcaggcagccatacgctctgctggcgttcggccggcgtctcaaagcgctccagcacccacagcacaccgcgatcgtcccagtgcagggcccaggccacgccatacaggatcacccctgtcagcaacagccaggaataccagcgcatggcaaaacgggaacgcggcttgggtgaagcggagggcagggacacggccattgggcgctttttccggaaagtcagcgttaggtgatagcacaggaacaacgggcctgcgcgcacgaggctgaggattatccggatggcgtgtgaaaaaaatgcaaaagcctgagatgtgggagggggcttgcccccgattgctgagtgtcaggcaacagatgtttgactgataaaccgctatcgggggcaagccccctcccacaatgttgaccgcgttttgtcagtgcttaacgaacaacgctttcaaagcgattctggcccgccagttccagcaccaactcatcccccacattcaacgggcctacaccggccggcgtgccggtgaggatcacgtcgcccgcctgcagcgagaagcagccggccatgtgctggatcatcgggatgatcgggttgagcatctgcgcgctgttgccgtcctggcgcacttcgccattgatgctcaggcggatgccgatgtcggtgacatcggcaaaggtgctgcccaccacgaacggtgcaatcaccgccgcgccgtcgaaggacttggcgatttcccacggcaggcccttggctttcagctcggcctgtttgtcacgcagggtcaggtccagggccggggcgaagccggagatagcgtccagcacttcttcacgactgggcttgttcgacaaaggcttgccgatcaacaccgcgatttccgcttcgtaatgcaccgaaccgcgttcggtcgggatgctgaaaccaccttccaacggcaccacacagctgcccggcttgatgaacagcaacggctcggtcggcgccgggttatccagttccttggcatgttcggcgtagttacgcccgatacacaccactttcccgaccggaaagtggatgttggtgccgtcgacatacttgtgctggtagctcatggaacgactccttcagggcggttaaacagcgaagatcttgccagggttcatgatcccgttcgggtcgaacaccgctttcactgccttcatgtattcgatttcaaccggcgagcggctgtaggtcaggtaatcgcgcttggtcatgcccacgccgtgttcggcggagatcgaaccgttgtacttcgcgacggtttcgaacacccacttgttcacggtggcgcacttggcgaagaactcgtccttgctcaggttttccggcttgaggatgttcaagtgcaggttgccgtcgccgatgtggccgaaccagacgatttcgaagtccgggtagtgttcgccgacgatcgcgtcaatttccttcaagaacgccggtactttggagacagtcaccgagatatcgttcttgtatggggtccagtgggaaatggtctctgagatgtactcgcgcagtttccacaggttgtgcagctgggtttcgctctggctcatcacgccgtccagcacccagccctgctccacgcaatgctcgaaggtttccagcgcgtggttggcgacttcttcggtggtggcttcaaattccagcagcgcatagaacgggcagtcggtttcgaacggcgccggcacatcgccacggcccatgaccttggccagggccttgtcggagaagaattcgaaggcggtcaggtccagtttgctctggaacgcgtgcaagaccggcatgatcgagtcgaagtcagtcgtaccgagcaccatggcggtgaggttcttcggcgcacggtccaggcgcatggtggcttcgaccacaaagcccagggtgccttcggcgccgatgaacagctggcgcatgtcgtagccggtggcgttcttgatcaggtcgcggttcagctccagtacgtcacccttgccagtgacgacctttatgccggccacccagttacgggtcatgccgtagcgaatcaccttgatcccgccggcattggtgccgatattgccgccaatctggctggaccccgacgaagcgaagtccaccgggtagtacaggcctttttcttcggcgacgttctgcaattgcttggtgaccacacccggctggcacacggcggtgcggtcggtgaggttcacgtcgaggatctggttcatatagtcgaacgacaccaccacttcgccgttggccgccacggcagcggccgacaggccagtacgcccaccggatggcaccagcgcgaccttgtgggtattggcccaacgcacgatggcctggacctgctcagtggtcttggggaagacgatggcggtcggcgcgggtgcgaagtgcttggtccaatccttgccgtaagcctccagggagtctgcatcggtcagcactttgccgggctcaaccagggtctttagctcatcaatcagggcaggatgggtcatcgacagaactctcgaacaattcatggtcatcctgagaacgcttcacgtcgcaggaatgagtgtttagcggggcgcgtatgctagcataccgcccccgcaggacagagcccaagggcgtttctgcggtgacggctttcctgccgtccgggtcagcttaagcgatccgattccctgccatttttctccgggatacaggtttacgcagatgagcaagacttctctcgataagagcaagatcaagttccttcttctggaaggcgtccacccatcggccgtcgaagttctgaaggccgccgggtactccagcattgagtacatcaccagttctctgccggaagcccagctcaaggaaaagatcgccgacgcgcactttatcggcattcgctcccgcactcagctgaccgaagaaatcttcgatcacgccaagaaactcgtggcggtcggctgtttctgcatcggcaccaaccaggtcgacctctctgctgcgcgcgagcgtggcatcgcggtgttcaacgcaccgtactccaacacccgttccgtagcggagctggtgctggccgaggccatcctgttgttgcgcggcattcccgagaagaacgcttcctgccaccgtggcggctggatcaagagcgcggccaactccttcgagatccgtggcaagaagctgggcatcatcggctacggctcgatcggtacccagttgtcggtcctggctgaaggcctgggcatgcaggtgttcttctacgacaccctgaccaagctgccattgggcaacgccacccaagtggccagcctgaccgagctgctgggcatgtccgatatcgtgaccctgcacgttccggaaaccgctgagacccagtggatgatgggcgagaaggaaatccgcgccatcaagaagggcggcatcctgatcaacgcggcacgcggtactgtggtcgaactggacgccctggccgacgcgatcaaggacaagcacctgatcggcgccgccatcgacgtgttcccggttgagcctcgctccaacgacgacatcttcgaaagtccgctgcgtggcctggacaacgtgatcctgaccccgcacatcggtggttccaccgctgaagcccaagccaacattggcctggaagtggccgagaagctggtcaagtacagcgacaacggtacctcggtatcgtcggtgaacttcccggaagtggccctgccggctcaccctggcaagcaccgtctgctgcacatccaccagaacatccctggcgtgatgatggagatcaacaaggtcttcgcggaaaacggcatcaacatctccggtcagttcctgcagaccaacgagaaggtcggctacgtggtgatcgacgtcgacgccgagtactcggacctggcgcaagagaagctgcagcacatcaacggcactatccgtagccgcgtgttgttctaaggtttcaaccgcaccacgaaaaagggagcccctcggggctcccttttttgcatctgaacaaatcttacttgacgttaaccgtgatcactttcgaggctacagtgggctcgaactggcggtgcacgttatcgcccgctaccagctgcaaggtgtgtttgcctggggtcaatgtcagctcggtttcggtttgcgccttgccgaaatgaatcgaggtggcagtggccgggatagcctcgtctgctttgagcgacgtcacgtcctggtcgaccagcaggtgatggtgaccggcaccgggcacctgcttgtcgatcggttccaggtccagacccttcatgccaaatttgacggtgaaggtcttgtcgacggtcgcgccatctttgggcgatacgataaacacctcggcgcctttgggggcgggggtgcgcggaacatcagcagcattcgccaacatcgaagcacccagcatcagggaggccagggtggcacgggacaaaagggctttcattcgcttctccagtttttctgtgaaatctgtagggttatgacaacttcgcgacaaattgctgtccaaggcactcaacaccatagcaaagcgatgctgaccggcgcctcgcacataaaaattctctaggagtgaccatgcgcttttcgcctggcctgttactgctgcttccccttctgagccccctggctcacgccgaactggtcgatgatgtgttcgatcgtggcgaactgcgcatcgcccttgaagccaatacgccaccgttcaacttcaaggacggcgacaaactcaccggttttgaagtggaactgggtgaactgctggccaaggaaatggacgtgcgctcctcgttcatcaccaccgatgacgccgacttgctgccaggggtggcaaccggcaagtacgacgtggccatcaaccatatcgctaagactgccgaccttgaggatcagttcgatttcagtgaggcttatcgcgagaagcccgatttggtgatcccgttccaaaagggtaacccggcgttcaagacgagcctggacggcgcgctgaagcgggtgaaggaggatggccggttaaaggcgctgtcgcagaagtggtttgacgcagaagccccgactacaactgcgccagtgcctgcgcagcctcaggtaactccaactcactgaacacctgcacgccgtggcgcttgagcagcgccgcggttacgccctcgccactcactttcacgccggtaaaggtaccgtcataggtgagcaggttgccgcaggatgggctattggccttgagcacggcgatgcggatagcgtggcgttcaaccagcgccagtgcctggcgggcgccatcaaggaacgctgcgctgaaatcttcgccctcagccgtcagcacctgggcacgcccctcccacacatccacgccctgcccgcctgggatctcggcagcaggtcgtggcgttggcaaaccacccgacacttccgggcagatcgcaaccacacgcccttcggcctgccacgccgccaattggtcgaacggcccgctggccccgccgtcgtaacgcaccttgtgcccgagcagacagcggctgatcagaatcttttgcatgtttaaaacggctcgttgccccgccggcgaaaccagccggtgagggacaggcgttcgcgcgtagcgggcatcacttcgtggggcacctcgcccgacaggaacaccaccaggcaaccgccggtgggcaccacatcgtattcgacgccgtccttgaggtacatgcgcaactggccgccatgttcgggcagccaggcgtcattcaagtagatcaccgccgagaccatgcgccggtcatcgtcgcggaaacggtccaggtgcttgaggtaaaaagcccccggcgggtacatcgcgaagtggctctcaaagtcttccaggcccaggaacaggccacggttcatggcgaggcgcaggctgtccatcaccgccatgtaagtgtcgcaaaccgccgcatcgccctcttccagccactggatgtggtcaccgcgaatgccttctcgaatctcctgggtcggcccccgccctaccgctgccggggccagttcaccttcggccttgcgtttacggcactcagccgccagttccagggtcagagcctggggcaggaagccgtcctgtcgcgaccagcccttttcggccaggtcgtcgacaatacgttgcagcaaggggtgatcgaggggtatttgcatggcgcgcatagtatccatacgcctgtgaatccgacagagccgccgagcgtctgaatgcactttagtcaggtgactgataggacttctcgacaaatcctacgcccgacacggacaatagtggccgactgacaggagtccctatgcgtcgtttgtttttttccttgctgatgttctgcgttttgcccgcctgggcagacggccatgaccagttgtacaaggtcgccggctgggccgaacaacgtgcgcatttcaatgacgccctcagtgccgcccagcaacgctaccgcaatagcctgccgccagcggtgtaccaggcgctggtggacaacagcaataaacgcttcgccgcccaggcggtggaccagcgtgccgaagcgcaattgcgcaagcacctggcggaccctgcgcctgccttggcgtttttccaatcacccctgggccgcaagattgtcgccgccgaattgctcgccacccgccgcgaccaactggcgaaaaatgcccagggcctgccgaaaatcgaggccgacgccacccgcagcctgatcatcggccacctggcccaggccctgccggcccgcgaagccggcgcggaagtcagcctggcgattgccggcgtggcggccgacagcctgagccagatgatccccggcctgctgggcggcggccaggcccagggtatgttgaatggccaacgcgagcggttgatgcagcagatcgacaaggacctgaacaacacgctgctgtacgtttatcgggatctgtccgacccggagctggaagaattcgcgacgtttgcggagtcgccggagggcaaggcgtattaccaggcggcacttgccgctattcgcgccgggctggcggtcgggcaaagcacttccagccttacgcagtaaaaagtgtgggagggggcaagccacctcccacatttggatcgcgttagttcaggtgacgggtgagatagctgaagtactgctcacgaatctccggaatctcattggccagatgatgcctgccacgcggcagcatcaacacctcgggctggtcgaacttgctgcgcaacacctgcaggttgtgctgccaatccacggtcatatcctcttcaccctgcacaatcaccggtcgccgagggctgcgcggtgcggcttcgatgcgtttgatccagcgcgccaatgcacccacccaggcggtcggcaattgccgcggctgcagcgggtcgacttcaaggaacggtttgaacgcggggtcgtgggtgttttcgctgaaccgccgcgcaatgcctttgacgaatgggcgcagcaggtaataactgacctgcgaccaaccccaggcacgcggccgcaccaacggtgacagcaggaaggtcttgccctgggccgggctgtcggcgccgtggttgagcaggtggtccaccaccaccgcgccgccggtgctttgcccgaacaggtgccagggttgcggcaactgcaatgcttcggcctgggtaaacagcgcccgcaccacgtgctggtacaccgcgaaatcatcgatgctggcgcgtgcgccgctggacagcccatgcccgggcagatcgcaggcgatcaccacaaaaccctggtccagcgcccacttcaccacatggcggtacaaccccatgtggtcgtagaagccgtggaacatgaacatcgtcgctacaggcctgggcggccaccacacctgcgcgaccacctcgaaaccgtccacctcgaagcgccccaggcggctctcggcctggtccagcccgtagaaacgctggtagacccgtgcctcggctgaaagcggttgcgcatccaccaggggccgcaagctttcgcgcagatgatcggggtcaaaggtaacgggcataaaggcttccagactggcggcgaagatgaatatcgagctgcgatattcatctgtcaggacaagcatggcaagctacgcgaccttcgaggatacatctgaatgcgaccgccctaccgcaccgccctattcgccagcctgatcctggttatctgcgtcggcgtgctgtgggcggcgtatgactggttccagggccgctacctgcgcgccttcagcgaacacacggcggtgttttccggcgacccattgaagctgcccgccgacctcgccggccccggcccgatccgcctggtgcacttctgggacccggcctgcccgtgcaacgtcggcaaccagcagcacctgggcgagctgatcgagcaatacgcgccccaaggcgtcgagttctacgccctgcaaaagcccggcagccacggccaactgcccgacaacctgcgcacgatgaaaaccctcaccaccctgcccggcgccgaccaggtgccggccagcccggccgtggggatctgggatcgcacaggcaagctcgcgtatttcgggccctacagcgagggcctcacatgcaactccagcaacagcttcattgagccgatcctcaaggccctagacgcgggacgccagataaatgctactcacaccctggcagtgggctgctattgttcgtggccaaaaggctcgtaacccgcctctctcttggtaaggaatattcatgaagcgcgtcttgcaggtgttcgcggttctggtcgtgctggctgcccttggcgcaggcgcgtacgtctatagcaaacagcccacccgccagggcacggtgacgctggccaacctgcaaggctccgtcacggtgcgctatgacgaccgtggcgtgccgcatatccgcgccgagaacgaaaacgacctgtatcgcgccctcggctatgtgcatgcccaggaccgtctattccagatggagatcatgcggcgcctggcgcgtggtgaactggccgaggtgctgggccccaaagtgctggagaccgacaagctgttccgcagcctgcgcattcgcgaccgcgccgcgacctatgtggcgcaactggatcatgagtcggcgcactggaaggccctgcaggcctatctggacgggatcaaccagtatcaggacagccacgcccgcccgatggagttcgacgtgctgggcatccccaagcgaccgttcaccgctgaagacaccatcagtgttgccgggtacatggcctacagctttgccgccgcgtttcgtaccgagccgttgctgacttacgtacgcgaccaattgggcagcgactacctgaaagtcttcgacctcgactggcaacccaagggtgcgctcaacctcgccgccagcgattggcagaccctcggcgccctcgcctcactgagcgaacaggccctggccgacaacggcctgccgcagttcgaaggcagcaacgcctgggccatcagcggcaaccgcaccaagagcggcaagccgttgctggcgggtgacccgcatattcgtttctcggtgccatcggtgtggtacgaagcgcagctgtcggcaccgggttttgagctgtatggctatcacaacgctctggtgccgatggcgttcctgggacacaacctggacttcggctggagcctgaccatgttccagaacgatgacctcgacctgatcgccgagagggtcaacccggacaatcccaaccaggtctggtaccacggccagtgggtcgacatgacccgcaccgagcaacagatcgcggtgaagggccaggcgccagtgacgttgaccctgcgccaatcgccccacggcccgatcatcaatgacgtgctcggcgagaacgccggcaacacaccgattgctatgtggtgggcgttcctcgatacccagaacccgatcctcgaaggcttctaccaactcaaccgcgccgacaccctggccaaggcgcgagccgctgcagccaaggtctccgcgccgggcctgaatatcgtgtgggccaacgccaagggtgatatcggctggtgggcggcggcgcaattgccgatccgcccggccggagccaaccccggtttcatcctcgatggcagtaccgaacaagccgataaactgggcttctaccccttcaccgccaacccccaggaagagaacccggtgcgcggctatgtggtgtcggccaatgctcagcccgtgtcacccaccggcatggaaatccccggctattacaacctggccgaccgtggccagcagttgaatgcgcagttgagcgacaagagcgtgaagtgggacgtgaacaacagccaggccttgcagctgggcaccaccaccgctttcggcccgcgcctgctggcgccgctgctgccggtactgcgtgaggtggtcaaggacccggcgcagctgaaactggtggagcagcttgccagctggaagggtgactacccgctggactccaccagcgccacgctgttcaaccagttcctgttcaacctggccgacgcggccttccacccgaaactcggcgacggcatgttcaagaccctgctcaccacccgtgtgatcgacgccgcgctgccacgcctggccgccatgccggattcgccgtggtgggacggcaagcgcgctgacaccgtcaagctcgcctgggacaacagcctcgcgcacctcaaggccacccttggcgatgacccgagccaatggcagtggggcaccgcgcataccctcacccacggtcatccgttgggcatgcagaagcctttggacaaggtgttcaacgtcggcccgttccctgccccgggcacccatgaagtgccgaacaaccagtcggccatgatcggcccggcaccgtggccggtcacctacggcccctcgacccgtcgcctgatcgatttcgccgacgtggcccacgcgctgaccatcaacccggtcgggcaaagtggcgtgccgtttgaccgccactacagcgaccaggccgaaacctacatcgaaggtggctacgagcaggcgcacttcactgacgaggaagtcaccgccaacacccgtggcaccctcaagttgctacccgcccgatgaacgcaaacgccccggcgcctcgccataggtttccttgaatttcttgctgaacgccgcctgggactggtaacccacctgggcggcgatatccagcaggctcaggtgtgactggcgcagcaggttgaacgccagctccatgcgcaattgggtcagcagcacccacggcgatacgcccgcgactttcacaaaggcgcgcatgaaggtggcgcgtgacatcgtcgcagcggccgccaggctgtcgatggtccactcataccctggatcggccagcatggcttgccaggccttgctcaggcgcttgtcggtaagcaaggcgaaggtgccggcgaccggtgcctgacgggcgagccaggcgcgcaggatcagggtgaacagcgccgatgacaatgcatcgataaacgagcgggcgccgagttgctggccgtccgcttcgctgcgcaataacgcgatcaacgccgccagttgcccgtcgccgtgccactcgcggctggacacaaccaggtattccggcaacgcgccgagcagcagcgactggcggttgtagtgaaagctgccgcagagcatgtccaggtccggctggtcaccgcccaggcggtgcacggtgagcacaccgccttcgatgaccttgggttgcatcggccggatccgcgcgccctggctgcgcagcaaatgcgtggcaccgccgggcatcagcaaaatatcgccgtgctccagggtcacttgctgcccacccgacaactcggcgcggcaggtgccactgagcacgatgtgatagggcgccatacccaggctttccggcgcatggtccaaggcccagtcgccctggaactggcagcgcagatccagactgccgcgcaggttggccagcgcgataagcgtgtcgatcgaattcatttgcgagcatcggtcaaaaacatgagcggattgaacaataacgccgcccccgaacggaagacactggctccacaccaccctacccgttcaggagttaccgcaatgttcaataactggtccgacttgctgcctaccgtgaagaaagcctttggcgcgctgggcaagagcaacccgaagatggtcaaagcctacatggcgctgggcgaagctgccgaggaaaacaacgtcctcgatgccaagacccgtgaactgatttccatcgccgtggccattaccacccgctgcgacggttgcatcggcgtgcatgccgatgcggcaatcagggccggcgccacccgcgaagaagtcgctgccacgctggccactgcgatctcgctgaatgccggcgcggcgtacatctactcgctgcgcgcgctggaagcctacgacacgctcaaaccggcgccgcaaagttaagccggaactgttgcggcgtcacgcccagccgacggttgaacacactgcgcatgtgctgggcgtcacgaaatccgcattgataggccacggtcttcagcggtgcggggctgctttcaagcatcacccgcgccgcgtccacccgcgcgcgctcgacaaactccgccggcgtgatgcgcgcctcgcgggcaaacacccgggagaaattgcgcgcactcatgttcgcggccttggccaggtcggcaatggtcaggtccccggtcaggttcgccaacacgtacaactgcaccagcgccaccgccgaggtggtttcggcgtggggcgtcagaaacgggctgaactgcgactgcccgcccgaccgctgggtgaacaccaccaggcgcttggccacgctcaacgcgacttccgggccatggtcctgggccagcagatacaacgacagatcgatgcccgccgtgaccccggccgaggtgtagagattgccatcctgtacgtagaggcgatcggcttcgacctgggccgtggggcacaggcgcgccagatccgccgcatcgttccagtgggtggtgacggttttcccgtccagcagcccggcgcgggccagcatgaaggcgccgttgcagatggagccgaagcgctgcgcacgcgccgtggcaccacgcagccaagcatcgaactcggcgccgaagtcttcgaagggtaactgcggaccacccgccaccagcagcaggtcatagggctcaagggcatcgctgtagtgccggtgggcctgcagcgacagaccgttggaagcggccatgttgccgtgaccgaagccgatgacttccaactggtaatgatcctgcggcggcagaaaacggttggcttcgcagaacacgtccatgggaccggtcacgtccagtgactggacgccggggaagatcaggatggcgacggttttgctcatgagcaggcacaccttctctaactggataaacacagaacccctgtgggagctggcttgcctgcgatgcagacgcctcgatcattcaggtataccgagtcgatgctatcgcaggcaagccagctcccacatttgaccgaatacacctttggcacgatgtacaaccacattggccgggattgctccctcgccgcaatggccccttcgctggcacaagaccagactggaatctttccagaggagaacgaccatgagcaccaccatcgccggcatccagatcccggacagcgccctggccaaggccaccaccgaatacatccgcgacgtcgaatccgacctgctctaccaccactcgcgccgagtgttcctgttcggcgccttgagcggtgaacgcaagcaactggcctacaacccggagctgctttacgtcggcgcgatgttccatgacttgggcctggtggagggccatcgcagtgacaacgagcgcttcgaagtcgacggcgccaacgccgcagccgcgttcctcaagccgtacgggctgagcgatgacgatatcgaacaggtgtggctgtccatcgccctgcacaccacgccgggcgtgccgcagcatttgcgcccgaccgtggcactggtgacggccggtgtggaaatggacgtgctgggcatggactatgccgcgttttccagcgtgcagcgcgaagccgtggtgcatgcgcatccacgcggtgaagggttcaaggagtgcatcatctgcgcgtttgccgacggcttgcgccatcgtccgcagaccacgtttggcaacgtgaagacggatgtgctggtggatcaggagccggggttcaagccgatgaattttgttgaagtgatccgcaagtcgccgtgggtcgcatagttgacttgaaatgcaatcaaatgtgggagggggcttgcccccgatagcggagcatcagccacatatccattggctgacacactgtcatcgggggcaagccccctcccacatttagaccggtgcagccgcccggcgcttgtccggctgctgccagccatccgccgcggcttcttcgatggcttgctgaatggccttcttgcgcatctcttcggcacgccggctgaagaaccacaccaggaaggtcaccagcgacaccgccagcaggatcaggctggccacggcgttgatctcgggtttgaccccaaggcgcaccgccgagaacacttccatcggcagggtcgtcgaacccggccccgacacgaagctggccagtaccaggtcatccagggacagcgcgaacgacatcatgccgcccgccgccaacgacggcgcgatcatcgggatggtgatcaggaagaacaccttccacggtcgcgcacccaggtccattgccgcttcttcgatcgacaggtccaattcacgcaagcgcgccgacaccaccaccgccacatacgccgcacagaacgtggtgtgggcgatccagatggtgacgatgccacgttcctggggccagccgatcatctgcgccatggccacgaacagcagcaacagcgacagaccggtgatcacttccggcatcaccaatggcgcggtcaccaggccgccgaacagcgtgcggcctttgaactggctgatgcgcgtcagcacgaaggccgccaacgtacccagcgccaccgccgccaccgccgtgtagcaggcgatttccagggaacgtgccaccgagcccatcaactgagtgttgtccaaaaggcccacgtaccacttgatcgaccaaccgccccacactgtcaccagtttggattcgttgaacgagtagatcaccaggatcagcatcggcaggtagataaacaacaaccccgccaccagcatgaaactcgagaaactgaagcgcttcatatcttgccctccatctctttggcttggctgcggttgaacaggatgatgggcacgatcaggatcgccagcatcaccaccgccagggcagaggccaccggccagtcacggttgttgaagaactcttgccacaacactttaccgatcatcagggtttccgggccgccgagcagttccgggatcacgaactcgcccaccactgggatgaacaccagcatgcagccggcgatgatgccgttcttggacagcggcacggtgatcttccagaagctgttgaaggtgctcgaacccaggtcggatgcggcttccagcaggctctggtcgtgtttcaccaggttggcgtacaacggcaggatcatgaacggcaggtacgaatagaccacgccgatatacaccgcaatgttggtattgaggatctgcagcggctcgttgatcaagccgatggacatcaggaagccattgagcaggccgttgttgctgaggatgcccatccacgcatacacgcggatcaggatcgcggtccaggtcggcatcatgatcagcagcaccagcacggtctgcatctctttgcgcgcgctggcaatggcgtaggccatcgggtagccgatcaacaggcacagcaacgtgctgaagaacgccattttcagcgagcccaggtacgcagcgatgtacaactcgtcgtcgccgagcatcgcgtagttgcccaggttgagcaccaattgcagtttctgctcaacgaaggtgtagatctcggtgtacggcgggatcgccacgtcggcttcggcaaagctgatcttcaggacgatgaagaacggcagcatgaagaacaggaacagccacaggaagggaatgccaatgaccgcatgacggccactgggcgttattcgttgcaggcggcgcttgagcttcttcatgttcatgagcgcagtaccacgccgctgtcgtcttcccaccacacgtacacctggtcaccccaggtcggccgctggccgcgacgttcggcgttggccacgaaggactgcaccagcttgccgctcggcagctccacgtagaacaccgagtggccgcccaggtaggcaatgtcgtgcaccttgccgctggaccagttgtgctcgcaggtcggcatttcggtggtgaccagcagtttttccgggcggatcgcgtaggtcaccgacttgtcttccaccgaggtggcgatgccgtagcccacatagatgtcgcggtccaggtcggcgcacttgagcaccgcgtggccttcggcatcgtctaccacctgggtatcgaagatgttgacgttgccgatgaactcgcacaccaggcggctggtgggcgtctcgtagatgtcgatcgggctgccgatctgggcgatccagcccaggtgcatgatcgcgatgcgttcggccatggtcatggcctcttcctggtcgtgggtcaccattacgcaggtcacacccacgcgctcgatgatctccaccaactccagttgcatctgcgaacgcagcttcttgtcgagggcgcccatgggctcatcgagcagcagcagtttcggacgcttggccagggaacgggccagggccacacgctgacgctggccgccggacaactggtgcggcttgcgcttggcgtactggctcatttgcaccagcttgagcatctcggccacacgggcgtcgatctcggccttggggatcttgtcctgttgcaggccgaacgcgatgttctgcgccacggtcatgtgtgggaacaaggcgtaggactggaacatcatgttgatcggccgctcgtagggcggcatgtcggtgatgtcttcgccatcgaggtagatgcgaccctcggtcgggcgctcgaaacctgcgagcatgcgcagcaaggtggacttgcccgaacccgaaccgccgagcagggcgaagatctcgcccttcttgatttccagggacacatcgtccacggcaatcgtctcgtcgaacttcttcgtgacccggtcgattttgaccagcaccttcttcggtgtctggtccccttcgagggctttcttataggcgccggaggcaactgccatttacgaaactcccagaaaaaaaagagtgcagcggacccaatgcgggcctgccttggatagtttgagccttacttgcccgtcttgaccttggtccagctacgggtcatcaagcgttgcactttcgggggtagctcgaagttgacgaaggtcctgtcgagtaccgcctgcggtgggtaaaccgcttcgtccgtgcgtatcgattgcttcatcagtttgtccgcccctgggttagggttggcgtaaccgacgtaatcactgacctgggcgatcacctcaggttgcagcaaatagttgatgaaggcgtgggcctctttgacgttggtggcatccttggggatggccagcacgtcgaaccacaggttgccgccttccttcggaatcgcgtaggcgatgttcacgcccttgcccgcttcgcttgcgcgagccttggcctggaacacatcgccggagaacccggcggccacacagatgttgccgttggccaggtccgatatgtacttggaagaatggaagtaggtcacgtagggccgcactttgagcagcttggcttcggccttcttgtagtcttccgggttctcgctgttggggttcaggcccatgtagttgagcactgccggcagcatttcatccgccgagtccatgaacgacacgccgcaggtcgccagcttcttcatgttctcaggctcgaacagcacggcccaggagtcgatatggtcgatgcccagcacttccttcactttatcgacgttgtagccaatgccgttggtgccccacaggtacggcacggcgtactggttgcccgggtcgttcttttccaggcgcttgagcagcgccgggtcgaggttggcgtaattcgtcagcagtgacttgtcgagtttctggaatgccccggccttgatctgcttgcccaggaagtggttggacggcaccaccacgtcgtagccggtacgcccggccagcagcttgccttccagggtttcgttggagtcaaacacgtcatacacgggcttgatgccgctggccttttcgaagttggccagggtgtcggcgccgatgtaatccgaccagttataaatatgcacagtcggtgcggcctgcacgctcaacgtcagcgtgatacctgcacccaccagcaaggctttgcgaaataaagaaattggcaagtggaggtcctcttaaatagttgggccttaaagttgttgcccggcaacaaaaccggcgcgcaacttaccctcgataaaccgatccggcaaaactttctgtcatttaatttgtgagaggggcagtcaaactgcccctccacaggtttcagggcttatttgcccgatttgatcttggtccagctgcgtgtcatttcacgctgggttgcagccggcaggtcggcaatcgcgtagagcttggcctgcacatccgctggcgggtagatgcccgggtcgctggtgatgtctttgtcgaccagtgcggtggccttctcgttaccgttcgggaagcgcacgctatcggtgatcttggccatgacttccggcttgagcaggtagttcatgaacttgtaggccgcgtcgacgttttcggcatccttagggatggcgaccatgtcgaagaagctgccagcgccttctttcggaatgtcgtaggccaccttgaccttgccaccggcttcagccgcacgggacttggcctgctggatgtcacccgagtaccccacggccacgcagatgttgccgttggccaggtcggagatgtacttggacgagtggaagtagccgatcgaaggacggatcttcaggaacagcgcttcggcctgcttgaggtcgtctttcttctggctgtcggtcggcaggcccaggtagtgcagcgcgatcggcagcatttcggttggcgaatcgaggaagctcacgccgcagcttttcagcttggcgatgttctcaggcttgagcagcacgtcccacgaatcgatcttgtccacgcccagcgcggccttgaccttctccgggttgtagccgatgccgatcgaaccccacatgtacgggaaggcgtgcttgttgtccgggtcgctgaccgacacggctttaagcagggatttgttcaggttgtcgtagttggacagcttggacttgtccagctcttggtagacaccagccttgatctgcttggcgaggaagttgttcgacggtacgacgatgtcgtaaccggacttgcctgccagcaacttggcttccagggtttcgttgctgtcaaaaacgtcgtacaccaccttgatgcccgactctttttcaaagttggcgatggtgtccggtgcaatgtagtcggaccagttgtacacgtgcagcactttatcgtcggcctgggccgcgcccgccattgcgcccatcagggacaaggcgaggagggtcttgccagcgttcttcaaacctaatgccttcatttggtgatgctccaattttttcttttttgggccacaagctttttatgttgagtagcccagccaaagggcaacaaaacagggcgacagtctggcaagttccgaggccggctttcaaccaaagcctcatttataactgcccaggacgcagcgcccgaaagccgctgcgttctgagcctagcacttagccctgcaatgccgccaaagtcaggtccaggcactggcgagccttggtcaccagctcgtcgatttctgccttgctgatcaccagcggcggcgaaatgatcatggtgtcgcccacggcgcgcatgatcaggccattttcgaagcagaacgtacggcagatcatcccgacgcccttgccttcgtagcgtttgcgggtggccttgtcctgcaccagttcaatggcaccgagcatgcccacgccgcgcacttcgcccaccagcggatgctccgccaattccctcagacgtttctgcaaatacggtgccgtttcgtcgtgcacacgcttaacaatttgctcatcgcgcatgatgcggatgttttccagggccactgcagcggccaccgggtgaccggagtaggtgaagccgtggttgaaatcaccgccttcgttgaggaccgccaccacgtcatcgcgcacgatcaggccacccatggggatgtaacccgaggtcaggcccttggcgatggtcatcatgtgcggcttgaggtcgtagaaatcgctaccgaaccactcaccggtacggccgaaaccgcagatcacctcatcggcaataaacaggatgtcgtacttggcgaggatttccttgatgcgcggccagtaggtgtctggcggcacgatcacgccaccggcaccctggatcggctccgcaataaacgcacctacgttgtccacgcccagctccaggatcttttcttccagctggttggcggcccacacgccgaattcttccgggctcatgtcgccgccttcgccaaaccagtacggctgggcgatgtgggtgatgcccgggatcggcaagtcgccctgttcatgcatataggtcatgccgcccaggctggcgccggccaccgtggagccgtggtagccattcttgcggctgatgatggttttcttgttcggctggcccttgatcgcccagtagtggcggaccatgcgcaacatggtgtcgttgccttcggaaccggaaccggtgaagaacacgtggttcatgccggcaggtgcgatgtcggaaatggccttggccagttccagcaccggcgggtgtgcggtctggaagaacaggttgtagtacggcagttctttcatttgcttggcggcggcgtcagccagttcatcgcgaccataaccgatcgccacgcaccacaggccggccataccgtcgaggatcttgttgccttcgctgtcccacagataaacgccgtgggctttggtgatgatgcgcgggcctttctctttcaattgcttgaagtcgctgaacggcgccaggtggtgatcactgctcaaggcttgccattcacgggtttgcgggttgttgctggacataccaatctcctagacttttcaggtgagggcgcgctgttcccacagcgcgcccggcgcatcagacggcaaagagcaggaattcccgctcccacgaactgatcacgcgcttgaagttttcatgctcggcccgcttgaccgcgacgtagcctgtgatgaatttctgacccaggtatttctcgatggtcttgctgttttccatgcgctccagggcgtcttcgatggtcaacggcaggcgcaggttgcgccgctcgtaaccacggcccaccaccggcgcgctcggattatggccttcgaccatgccgatgtagccgcacaacaggctggcggcaatcgccaggtacgggttggcgtcggcgcccggcaggcggttttccacacggcggttctgcgggccggcatccggtacgcgcaggccgacggtgcggttttcttcgccccattccacgttcaccggcgccgaggtgtcgggcaggaagcggcggaatgagttcacgttgggagcaaacagtggcagcagttcagggatgaacttctgcaggccgccaatgtggttgaggaacagctggctcatggtcccgtcttcattggagaagacgttcttgccggtggcgatgtcgatgatgctctgatgcaggtgcatcgcgctgccgggctcgccggtcatcggcttggccatgaaggtggcggccacgtcgtgcttgagcgcggcttcgcgcatggtgcgcttgaacaccaggatctggtcggccagggacagggcatcgccgtgacggaagttgatttccatctgggccgtgccgtcttcgtggatcagggtgtcgaggtccagctcctgcagttcgcaccagtcgtaaacgtcttcgaacagcgggtcgaattcgttggcggcttctatagagaaggactggcgaccggtttccgggcggccggaacggccaatcggcggttgcagcgggaagtccgggtcttcgcagcgtttggtcaggtagaactccatctccggcgccacgatgggctgccagcctttgtcagcgtagagcttgaggactttcttgagcacgttgcgcggcgacagctcgatggggttgccttgcttgtcgtaggtgtcgtgaatcacctgggcggtcggctcgatggcccatggcaccaggaacacggcgttctggtcggggcggcagatcatgtcgatgtcggccgggtcgagcaattcataatagatgtcgtcttcgacatagtcgccggtcacggtctgcagcagaacgctttcgggcaggcgcatgcccttttcggcaatgaacttgttggtcggcgagatcttgccccgggtgataccggtgaggtcgccaatcatgcattcgacttctgtgatcttgtggtctttcaaccaatcggtgagctggtcgaggttgttactcataaatgcctctgggctgggtttcctggcatccattaaaggccaggcgttgtttgacgcagcatccgcgtcgttttttcgttcagggtaggagcttacctgccatttgctgctgcgttgcattcctcacgccaaagttgtgcgcaatcttgagcagcatgctgggcgcacgctgttcggtggcagatgaagaggcaaagaagaggtcggcccgggcgtcaagaatattggccggggagcgcgctatcacgcgggaggaatgtacggatgacacagccttgctgaagcaggccaagacgccgttgggcggcaggtgaaacatgaagcaccccggtattattgctgttatgggtttgaatcgagcttagccttgttcatttttttacacaacacccccgtaaaaaatacaacacggcccgctcaagcctgcgagtcctaagccgttcaaacccaaaaaaccgccccaaaaggccccaaaaaagccttcgtggcgcttttttagggcaaaaaaggcctcgcttgacttcggcatgccgttcgggttgactgaaaccagaaaagatcaatgattgatatttttaacaacaaaggtgttgcatcatgtcggtacccccgcgtgccgttcagcttaacgaagcgaacgcgttccttaaggatcatcctgaggttctgtacgtagaccttctaattgcggatatgaatggtgtggtgcgcggcaagcgcatcgaacgcaccagcctccacaaggtttacgagaagggcattaacctgcctgcctctttatttgccctggatatcaacggctctacggtggaaagcaccggcctgggcctggacatcggtgatgctgaccgaatctgttatccgatccccgacaccctgtgcaatgaaccctggcaaaagcgccctaccgcgcaattgctgatgaccatgcacgaacttgaaggtgaacctttcttcgccgatccgcgcgaagtgctccgccaagttgtaagcaaatttgacgacctcggtctgaccatctgcgccgccttcgagcttgagttctacctgatcgaccaggagaacgtgaacggccgcccacaaccgccccgctcgccgatctccggcaaacgcccgcactcgacacaggtctacctgatcgacgacctcgacgaatacgtcgactgcctccaggacatcctggaaggtgcgaaagagcaaggcatcccggccgacgccatcgtcaaggaaagtgccccggcgcagttcgaagtgaacctgcaccacgtggccgacccgatcaaggcctgcgactacgcggtactgctcaagcgcctgatcaagaacatcgcctacgaccatgagatggacaccaccttcatggccaagccttacccaggccaggcaggcaacggtttgcacgtacacatctcgatcctggacaaagacggcaagaacatttttgccagcgaggatcccgagcagaacgccgcattgcgtcacgcgatcggcggtgtgctcgagaccctgcccgcccagatggcgttcctgtgccccaacgtcaactcctaccgtcgtttcggcgcacagttctacgtgccgaactcgccgtgctggggcctggacaaccgcaccgtggcgattcgcgtaccgaccggctcgtccgatgccgtacgtatcgaacaccgcgtggccggcgccgacgccaacccttatctgctgatggcttcggtcctggcaggcgtgcaccacggcctgaccaacaagatcgagcctggcgcaccggtggaaggcaacagctacgagcagaacgaacagagcctgccgaacaacctgcgcgatgcactgcgtgagttggacgacagcgaggtgatggccaagtacatcgatcctaaatacatcgatatcttcgtcgcctgtaaggaaagtgagctggaagagttcgaacactccatctccgaccttgagtacaactggtacttgcataccgtctaaacgacggctgcatcaaatgtggtgagcgggcttgttgtggcgagcaggcttgccctgcgttgggctgcgaagcagccctgaatccagacgccgagttctttcagaaggaactcggtgttttttattggggccgctgcgcggcccaacgcggggcaagcccgctcgccacacatacacagtcgcctcacaggtatggatcatccttatgctctgcgtacaatgcgctcagccttgtaggagacttccatgaccacccgccccgcgccccttcgcaaaccccgcgcccgcagccaggcccggatcgatgcgatcctcgacgccgcccgcaccttgctggctgccgaaggcgtggcgggtttgtcgatctacggcgtggccgagcgggcgcagattccgccgtcgtcggtgtatcacttcttcgccagtgtgccggcgctgttggaagccttgaccgccgatgtgcacgccgctttccgggcggcgattcaggcgcccatcgagcatgactcactcaagcactggcgcgacctgtcctgcatcgttgaacagcgcatgctcagcatctacgagcacgacgccgccgcgcgtcagctgatcctggcgcagcatgggctgactgaagtaacccaggcggatcgtcagcatgatctggagctgggcgacctgatgctcaccgtgttcaaccgtcactttgaagtgccgacgctaccgaaggatgtggatgtatttgccctggcgctggagctgagcgaccgcgtgtatgcgcgctcggtgcatcagcatgggctgatcacgccgcgtatggcgcaggaggggatgcgggtgtttgatgcctatgtggggctgtacctgccgccctacctgcccaagcgttaattttgtgggggccgggccggcctcatcgggggcaagccccctcccacattttgaatgtattcacaaatcaaagtgtgggagggggcttgcccccgatggcggtctcaagcgccatcacaacttggcgatcgacacctcggtggacttcacgaaggcaatcacttcgctgccaatcaccagttccagctccttgaccgagcgggtggtgatcacggaggtgacaataccggacgcggtctgcacgtcgatttccgacagcacgtcgccttcgacgatttccttgatggtgcctttgaattggttacgcacgttgatggctttaatagtcatggtgttcttccttcaggggacgagtgagttattgagcccaacgcaattgcgtaggcagcggtgaaacaggttcgggttccggtggcgagcccggcagggacaacacacggttgagcacttcagcctccaacgcggccaggcgatgcgagccccgggcacgcgggcgtggcaggtcgacgatcaggtcaagaccgatctcgccgtcttcgatcaggatcacccgatcggcaatcgccacggcttcactgacgtcatgggtcaccagcaacacggtgaagccgtgcttctgccagaggttttcgatcagttgctgcatctcgatgcgggtcagggcatccagcgcgcccaacggttcgtccagcaacagcaggcgcggttggtggatcaacgcgcgggccagggccacgcgttgcttttgcccaccggacagcgccgccggccactcgttggcacgttcggcgaggccaaccgcttccagggcctccaacgctttgggccgccagtcacccttgaggcccaggcccacgttgtcgatgatctttttccacggcagcaggcgcgcttcctggaacatcaaccgcgtgtcttcaatcgcttcgctcagtggtgcggagccggccagcagctcgccgccgctggctttgtccagcccggccagcaggcgcaacaaggtacttttaccgcagccactgcgaccgaccaccgccacgaattggccggctggaatgtgcaggtcgatgtccttgagcacttcgcgcgcgccaaaggccttgcgcaacttgcgtactgccagggggatacccttgagcaggcgcggaggttgttgagctgtcatgccgcacctcctttattcacttgatacgccgggtgccagcgcagccacacacgctccaggccacgagcggccaggtcggcgagtttgccgaggatggcgtacatgacgatggccaataccaccacgtcggtttgcaggaattcccgggcgttcatcgccaggtagccgatgcccgagctggccgagatggtttccgccacgatcagcgtcagccacatgaagcccagggcaaagcgcacgcccaccaggatcgacggcagcgcgcccggcaggatcacctggcgaaacaggctgaacccggacaagccgtagctgcgcgacatctccaccaacgccgggtcgacgttgcggatgccgtggtaggtattcaggtagatcgggaacagcgtgccgagggcgaccaggaaaatcttcgccgtctcatcaatgccgaaccacaggatcaccagcggaatcagcgccaggtgcggcacgttacggatcatctgcaccgaactgtccagcaggcgttcgccccacttcgacagaccagtgataaagcccaggaccaggccgatgctgccgccgatcacaaaccccaggccggcacgccagccactgatcgccaggtgcgtccagatttcaccgctggcaaccagatgcacaccggccgcaatcacggcactaggcgccggcaggatacgggtcgacaaccagcccgccgacaccgacaactgccacaccgcgagcaatagcaccggcagaatccagggcgccacacggtggcttagtttttcatagctcatggtgcggcctcagctctgcgacgcagctttgggaaggatgtcgttggccaccatctcgccgaacgggctgacgtagccggcgcttttcggcagctcgggacgttcgatatccaggtgcggaaacagcaactcggcgacgcgatacgactcttccaggtgtggataaccggagaagatgaatgtatcgatacccagcgccgcgtattccttgacgcgctccgccacggtcgggccatcgccgaccagcgcggtgcccgcaccaccacgcaccaggccgacaccggcccacaggttggggctgacttcgaggttgtcgcggttgccaccgtgcaacgccgccatgcgttgctggccgacggaatcaaagcgtgccagggaggcctgggcacgggcgatggtctcgtcgtccaggtgggagatcagtttgtcggcggccttccatgcttcttcgttggtttcacgcacgatcacatgcaggcggataccaaagcgcacggtacgcccgagcttggcggccttggcccgtacctgttcgattttttccgcgacagcggccggtggctcgccccaagtcagcaccatttccacctgctcggctgccaggtcctgggccgcttcggaggaaccgccgaagtacagtggcggacgcggttgctggattggcggataaagcagcttggcgcctttgacgctgatgtgcgcgccgtcgtaatccacggtctcgccctccagcacacgccgccagatgcgggtgaattccaccgaggcttgataacgctcttcatggctgagaaacaagccatcgccggccaactcttccggatcaccgccggtgaccaggttgaacaacgcacgcccgccagacaggcggtccagggtcgcggcctgacgcgcggccaccgtcggggaaatgatcccggggcgcagcgcgacaaggaatttcaaacgctgggtcaccgggatcagcgaagcggccaccagccacgagtcttcgcaggagcgcccggtcgggatcagcaccccgccgaagcccaggcggtcggcggcctgggccacttgctgcaaataaccgtggtcaacggcgcgagcgccttcggcggtgccaaggtagtggccgtcgccgtgggtaggcaggaaccagaaaatattgaggctcatggagttgtctcctgaagaagtcggattacggcgctttggcaacggcggcgggtggcgtccagatcacgtccttgatgctcaagggtttggggatcaatttgagttggtagaagctgtcggcgattttctgttgggcggcgaccacttccggggtcaggaacaatgcgccatagccttggcgcttcaccgaggtcagggtgatgtcagccggcagaccgagcagcggtgcgacttgttcggtgacttcctggggattggccttggaccattcgcccacggcgcgcacttcttccaccagcgccttgatcacttctggatgttgttcggcgtagggcttggtcgccaggtagaactgatggttgtcggcgataccggtaccatcacgcagggtgcgggcttgcagctgtttctcggcggcggcctggtacgggtcccagatcacccaggcgtccacgctgccacgctcgaaagcggcacgggcatcggcgggcggcaggaacacggtctgcacgtcggtgtatttcaggccggcgtcttccagggcacgtaccaacaggtagtgcacgttggagcctttgttgagcacgatttttttgcccttgagctcggccacggatttgatcggtgagtctttcggcaccaggatcgcttcactggtcggcgccggtggttcgtaggctacgtagagcaggtcggcgccggcggcctgggcgaacaccggcggggtttcgccggtcacgccgaagtcgatggagccgacattcaggccttcaagcaactgggggccgccagggaactcggtccattgcacgttgacgccttgggccgccaggcgtttttccagggtgcccttggccttgagcagcaccagcgtgccgtatttctgatagccgatccgcagggtctcggccgcttgagcttgaacaatggcgccgaaggacacagccgcagcaaacagtgcgaccagaccacgacgcaagatgacagtgcgcatggcgctctctccaaaaatgcgattaggggttttggctgcacctgcttggccgttggcggctgagtaaggtgagtgtttcttttatatcggtgaggctcagatgctccagcgagcactcaacagacgttcattcaacacgtgggggtccagcggtttcgggcgacgggccatggcgccgtaaagtgtttccagggcttcgtgcaaacgctgttcaagtaccggcaccaattgcgcctgggcactgccttcgccgtacgcgatctggctgtcttcggcaaagatgccgtggagcaactcctgggctttcaacgccgacagcaccggcttcaatgcgtagtccaccgccagcatgtgggcgatgctgccgccggtggccatcggcaacacgatcttgtgggccagggcgcgttcaggcagcaggtccagcacggtcttcagcgcgccggagaacgaggccttgtacaccggcgtggcgatcaccaggccatcggcgttggcgacttgctgcagcaggtcgatgaccttggggctgtcgaagcgcgcatgcagcaggtcctcagccgggaagtcccgtatctggtaactcaccacttctacgcctttgtcttgcaaccactgacgggttttatccagcaacaccccggagcgcgaacgctggctgggactgcctccaagtgttacgaccaacatgcaggaattccttgagcaggtgtcggcggttcgctgtgtggcgatggcgccaagatggaacagaccttatcagcagattcatatatctataaatcttattttttcatttgtttattctctaaatgcatatgagagttatagatctccaggcgaaaaaaaaggccgtcgaaacggcctgaaaacccctgctatgtgattcggtttacatctcaattctgtggtacatgcaccgccgccatcgcgggcaagcccggctcccacagnnnnnnnnnnnnnnctgtgggagccgggcttgcccgcgatggcgatttcagcatcaacgattgggctgcggggtgaggcgcaggtacggcttcaccgcgcgataacccttcggaaagcgtttcttgatctcttcctcgtccttgagcgacggcacgatcaccacttcatcgccgtcctgccagttggcgggcgtggcgaccttgtggttgtcggtgagctgcaacgagtcgatgacccgcaggatttcgtggaaattacgcccggtactggccgggtaggtgatggtcaggcggatcttcttgttcgggtcgatcacgaacaaggaacgcacggtgagggtgtcactggcgttggggtggatcaggtcgtacaggtcggacactttgcgatcggcgtcggccaggatcgggaagttgacgaccgtgttctgggtttcgttgatgtcttcgatccacttgtggtgcgagtccaccgggtcgaccgacagggcgatggccttgacgccacgctgggcgaattcgtccttgagcttggcggtaaaacccagttcggtggtgcacaccggagtgaaatccgccgggtgggaaaacagcacaccccagctatcgcccagccattcgtggaaacgaatcgtgccagcgctggaatcctgttcgaagtcgggggcgatatcgccaagtcttaggctcatggtgtggctcctgatgagtgcttatggagccaactgtgcatggattgcggattatttaaaaagaataaatatcgatttatctagacgataaaggaatattaaaaatctgttcattggacgtgggtgcaggcgaggagcaacatcgttttcaaggttcgagaaggccttgagacgctgcacaaagaggggttcaggaagggcctgcgggggtttggcccgacttgaaagcaagacaccctgcccggtgttgcaccgggcagggctttacaggcttacaacagcgtcacgctactagaacagtggcagcgagtagctgacgatcagacggttttcgtcctgggaacgggtgttcgccaggtcggtacgccacatagcgtttttccaggcaacgccgaggtttttcagcggaccttctggaatcacgtaggcaacggtgatgtcgcgttcccactcggattgaccggtggtttcggcacggccgttgttgttggcgatggtgtcgatgtcgctacctttgaggtaaacaacaccagcggtcaggccaggtacaccgacttttgcgaagtcataggcgtagcgagcttgccaggtacgctcgccagcgcgggcgaacttctggatctgcatgtcggtagtgatgtaagccgacgagccgtcaccctggttcaaccaagggaagtcgctgctgccattgctgacctggtaaccaccaccgaaggtgtgaccggcaacggtgtacaggaacaggccgctgtacaggttgttgtcgaccttgcctttaccggcgttgaagttgttgtagttaccgctggagtagtaagcggcggtgtcgccgttcttgccatcgtccgagctgttgaaataacgcaggtcagacttcagaacgcccgggccgattgcccagttgtgggtcagacccaggaagtgctgcttgtagaagtcttccagattgccgtagtagtactgggcagtcaggtctttggtcagcttgtagtcaccaccggcgtagtagaacttgttgctgaacttgccggcgttgtagttggagctaccgttggcgccgccaatcgacaggttttcgttgttgctggagttacggcccttggccttttccacctgaccggccaccaaggtcaaatccttgatgtcgttggtggtgatctggccaccttggaaggtttgcggcagcagacgaccatcgttggtcacgataaccggcagttttggctgcagggtacccagcttcagttcggtctgggagatcttcaccttaccggtcacgcccaggctggcgtaatcgtggacggctttgttgccgtcgcttgggaagatggtgccgccggaagcggtgccggtgtagttaccgtgatcagcacggctcgaatccagacgcacgccgtacaggccgatcgcgtcaacaccgaactgaacggtaccttgggtgtaacccgagatgaaacgcagatcgaagccttggccccattcagcgtttttgctacgtgtgttggacgtggcgttagggtggccgtcacggttatcagtgttgatgtagaagttacgcagccccagtgttgccttactgtcttcgatgaaaccggcggagtttgcctgctgggcaatcgcagccaaagctacggccaacgccaatgttgacttcttcatgtaccgctcctctcatttctaatttttgtatttctttggtctcgggtctgacgccctcgatccacagatgcccgattagcgccagatagtgactaccaagtcaatcgtaaccttgtgtgtctactaccttcgtctaatcgcagttgatttggtccctgcagggtaatgagtttttcatacacccaaaaagaattgtttcattctttttcatacgattcgggaataagccttttcatgacgcggacccgtcagggtagacgacccactccataagctaatgcctaaaaggtatttgttagcgcttttttagatcgtttagtgtggccgtactgttgcatacgtcacccacgatcaaaaaggcgacgccatcatggccaaacgcacatcctcccgtcaatttgttacagtttttgtgtcactaatactttcttttggtgtcaaagccgccgatttgaccatcggcgagaaaattgcctagtgccgtttcaacagtgggccggaagtcgtaaccgccatcgcctcgggcgacttgcgaatcggcaacctcggttccagccctcttgccgcagtggcatagcggaatctatccatcgtcgcgttcatcgtatcggcccagatcaatacttctgaagcatgggtggtgcgtaatgacagccacattgacgcacccagggatttgatcggtaaaaccatcgccacgccgtttgtcattagtggatacggaaccggtgcacaaaatcgcgaaaatgacaggcgccaacgccgcagacactcctgagctgctggcaggcacgacattcccggatgcccaggcacaacaagccgatgcgctgctaaaaggcggcacggcaaagtttttgaaggaaaagggaaaggtggaggtggtgctgccggattacttggccttggtgactgacaaatttatcagtccgagaactgatccatgtgggagcgggcttgctcccacattttttgacctgagtcgttcccgaaatcgaggttacagggccttctcgaaaatcttcgaattacgctgatagttgtacagggacgcccgcgcagacggcagacggtcaacactgctcggctcaaacccccgctcacggaaccagtgggcggtgcgggtggtgaggacaaacaaggtcttcaacccctgcgcccgggcacgggcctggatgcgctccagcaacacatcaccacgtgcgccatgacggtactccgggttcactgccaggcaagccaactcacccgcgtccgaatcggcaatctgatacagcgccgcacaggcgatgatcatgccttcgcgctccaccacgctgaactgctcgatctcacgctccagcacttcccgcgaacggcgtaccaggatgccctgctcttccagcgggctgatcaggtcaagcaaaccgccgacatcctcaatcgccgcttcgcgcacctgctcgaattgctcctgggccaccagcgtaccgccgccgtcccgggtaaacagctcggtgagcaaggcgccgtcttcggcatagctgacaatatggctgcgccctactccaccccggcacgcttcggcggcggcatcgagcaattcggcctgatagttggttttgcccaggcgttgcaggtgagccggcacctgttgcgggcgcaactcgcgtaccaggcgaccattttcatcgatcaagcccatatcggcgccaaacaacagcagcttgtcggcgcccaggtcgatggcggcgcgggtggcgacgtcttcgcaggccaggttgaagatctccccggtcggcgagtagcccaacggcgacagcagcacgatggagcgttcgtccaacaggcggttgatgcccttgcggtctacgcggcgtacttcgccggtgtggtggtagtccacgccatccaatacaccgatgggacgtgcggtcacgaaattaccgctggttacacgcaggcgcgagccctgcatcggcgacgaggccatgtccatcgataggcgagcttcaatggcgatgcgcaggtggccgaccgcgtcgatcacgcactccagcgtcgccgcgtcagtgatgcgcatgccttcgtggtaagtcgggatcaggccacgcgcttcaaggcgcacttcgatctgtggccgcgaaccgtggaccagtaccaagcgcacgcccaggctgtgcagcagcaccaggtcgtggacgatattgccgaagttgggatgctccacaccgtcgccgggcagcatgaccacaaaggtacagtcgcggtgggcattgatgtagggggacgcgtgacgaagccagttaacgtagtcgggcatagaacctgggcctgtaataaaaagcagccgaaaaaggatgaatcatgaaagcgcacggcgggctgatggttatcgtcggaacaggcttggcgacacgctcactctccttctatgtacgaacaggcaggggttaatttatgcaggtttcaggcagtaatgttcgatcagttcccgcaatagacgcactgtaggcgtcaagcgtgacatttcgaggtattcgcccggctggtgcgcgcaggcgatgtcgccggggccgagcaccagggtttcacaaccaaggcgctgaagataaggcgcttcggtgccgaacgctactgcttcggcacgatggccggtcaatcgttccgccacccgcaccagttcggcgtcttccggttgctcgaagggcggtacctcggggaacagcggcgcgtagtcaatcttgacctgatggcgctcggccaacggctggagcttctggcggatcgcatcacgcagcacctgagggtccatgcccggcagtgggcgcaggtcgaactccagggaacactggccgcagatgcggttggggttgtcgccgccgtggatacagccgaagttcatggtcggctgcggcacgctgaattgcgggttgcggtactcgcgctgccaggctaggcgcaggccgcgcagttcgccgatggcgtcgtgcatggcttcaagcgcgctgtggcccaggctcgggtccgacgaatggccgctttggccaagaatatcgatgcgctccatcatcacgcctttatgcaggcggatcggtttgaggccagtcggctcgccgatcaccgctgcgcggcccaatggacggcccgcctcggccagtgcacgggcgccggacatggagctttcctcgtcgcacgtggcgagaatcagcagcggctgtttgaatggctgatccagcagcggcaacactgcttcaatggccagcgcgaaaaagcccttcatgtcgcagctgcccaagcctacccaacggccgtcgacttccgtcagcttgagcgggtcggtcttccacagcgctgcgtcataagggacggtatcactatgacccgccagcaccaggccaccgggcccactgccgtaactggccaacaggttgaacttgccggggctgacctgttggatatcgatggcgaaacccagatcccccagccaagcggcgagcaagtcgatcaccgggcggttggtctggtcgagagacgcctgggtgcagctcacggatggcgcagcaatcagcgcggcaaactgctctttcatggacggtaacggcatgctcggcctctcgacttcccggatgaacctcactatagagccatctgcacgacacaataaaccgttgcggcacgttgccgggctcagtcctgtacactgcacgaccttggcagccactcttttacccggctgcgctcccgatcctggatgttccggccatgcaaaaagaaactgaaatcaagctccgcgtcagccgcgagaccctcgccgcgctgcgtgagcacccgctcctgaaaaaacgcaacaaaagtggctgggaacgccgtgagttgatgaaccagtacttcgacactcccgagcgcgacctggcccaggccaaagtcgccctgcgcctgcgcaaggacggtgacgacatcattcagaccctcaagacccgtggccagagcgtcgccggcttgtcggaacgtaacgaatacaactgggaactgcccaaagccaagctcgacgtaaagaaactcgacggcgaatgctggcccgagcaactggccgagctggacaaaaagaccctcaagccgatcttcaccaccgacttcgtgcgtgagcgcgccgaaatcgcctgggggcgcggcaaggccaaggtggtgatcgaagccgccctggacctgggccacgtggtggtcggcaagcagaaagaagaaatctgcgagctggaactggaactgcgcgaaggcgaaccgtctgccctgctggaactggccgccgaactggccgcgaccctggcgttgatgccgtgcgatatcagcaaggccgagcgcggctaccgcctgtacgacgccagcagctactccctgagccttccggcgccacagttgcacgccgaaatgccgctggatgacgccttcgccgcaatcatgtggcacctgctgggcagcagccaacgcctggccgagcaataccgtttcaatggccactggcgcctgctgcaagactgggtcgacaacctcggcgaactgcgtgccctggtcggcagcctcggccaggcggcaccgcgtcagtccaccagcgagctgcgcagcgcactcgatgccctgctggaagactggcgtccactggtacaggccggtgatgacgacgaagacatccgcaaagccgcgccggagcagttcgccgaagaactggacgacgtgcgctggggcctgttctcgctgaacgcttcacgctggctgctggcccgcacctggaccgcggaccgcaacgtgcgtggcaaccgccaaggcgccgcgcaaatcaccaactggctgccgcgcctgctggccgacgatgccgtcgccctgcaactgccgcgctaccagcaacagccggaagacctggccgagcaattgccacgcatcgagcgtatccaggcctggctgcaccatgcgcgtcaggtggtcgacattcccgaactggaccgtctgtacggcgagctgaacaagttggtgcaactggccaaccagccgatcaccgatgagtcgctggatgcgcggatgcatcaggcgattgcggtgtatcagaaccgggcgtggaagaccttgttgcgcctgtaaggccgctttcgcgggcaagcccgctcccacactgactgggttcacacatagaaatctgtgaacccaatccaatgtgggagccgggcttgcccgcgatgaggccatccctgtcagcgcaatactggcaggctggtggtggatttgatctcggacaaagccacaatcgaattgacctcctgaatccccggcaccatcgacagcttctcgaagaaaaaccgctcatacgcctcgatgtccgaggtgacgatgcgcagtagaaaatccaccgcccccatcagcacataacactccagcacttccggaaacccgcgaatcgcgtcggtgaactcggtgaagttggaacgaccgtgggcgttgagtttcacttcggcgaatatctgcgtgttgaggccgatcttcttgcgatccagcaaggtcacctggccgcgaatcacgccctcttccttgagccgttggatgcgtcgccagcaaggcgactgggaaaggcccacctgttcggcgatctgcgcgctggagagagaagcgtcttcttgcaacagggccaggatacggcggtcataggcgtccaactcgctgtgcatataaataccctccatcgcacttattctgaattgattgattcgattttttacaaaacaggcccatcttagataagaaatctccggtggcgaatgtaaaaatttctccagtcgaatctggagctttcccatgcacgccgtcgaaaccaaccaccccgctacccgcgtcgatgcgtgggccgtcaacaacgcccattgccaggcgcattaccagatcgtcgccgaggcggagcccgacgtggtgtgccgggtacttaactacttcgccctgcaatgcctcacgccgcaacaggtcacggtcaaccgcgaagaagacctgttgaacatcggcatcgtcatggacggcctgagctggcaccgcgcccaggtgatcggtgaaaagattcgaaacctgatcagcgtgtgcgcgctggacgtgtggtcggctgatgccgcggggcctctggcagtggtggcggtcgctcagtaagaacctgcaatacacgccgggaggaagatatccaggggctggctagcctgggatttacgcccactgccctcaggaaaaccttcatgccggttgatcaacgcttggaactgcatcaactgctgccggctttgcttgaagggcgactgatcaccccagaagttgcacagcagttgtcggcgctgccggccagcaacaccttgcatcccctggaacgcatcgcagcccttggccccagcctggaaaccctgtccgaatggctggcccagcatgccgggcaaccgtacctgcgtatcgacccgttgaagatcgatgtggcgacggtcgtgccgctcatgtcccacgcgttcgcccaacgccactcgatccttgcggtggcggtggacgcgcagacggtcaccgtcgccagcgcccagccacacgtcaccagttgggaagccgggctggcgcaggtgctcaagcgctcgatcaagcgtgtggtcgccaacccccaggacataacgcgctgtatcggcgagttctaccggctggcgaagtccgtcagcggcgccgatcaaaaagttgcggcaccgggcaacaacgaactgctcaacctcggcgccagcgaccaggagccggatgccaacgacgcacatatcgtcaacatcgtcgactggctgttgcaatacgctttcggccagcgcgccagcgatatccacattgagccgtgccgagaacagggccgtgtgcgctttcgtatcgacgggttgttgcacgacgtctatcagttcccgccccaggtcacgatggcagtggtcagccgcctcaaaagcctgggccgcatgaatgtggcggaaaagcgcaggccccaggacggtcgggtcaagaccaaaagcccgaccggagcggaagtggagctgcgcctgtccaccttgcccacggcgtttggcgaaaagctggtgatgcggatcttcgacccacaagtactgctcaagggctttgaccagcttggtttatcggttgaggaccagcaacgctggcaagccatgacgagccagaccaacggcatcatcctggttaccggccctaccggttcaggcaagaccagcaccctctacaccacgctcaagcaattggccacgcgggaggtcaacctgtgcaccgtggaagatccgatcgagatggtcgagccggcgttcaaccagatgcaggtgcagcacaatatcgacctgaccttcgccagcggcatccgcgccctgctccgccaggacccggacatcatcatgatcggcgagatccgcgaccaggagaccgccgaaatggcgatccaggccgcattgaccgggcacatggtgctgtcgaccctgcataccaacgatgcgcccagcgccatcagccgcttgcaggaactgggcattgcgcattatttgatcaaggccaccttgctcggcgtaatggcgcagcgtttggtgcgggtcttatgcccgcactgcaagcggtctctgggtgacgcccatgaagcggtcgggtgcgttgaatgtcgacacagcggttatcaggggcgggccggcgtttacgaaatcatggttttgaacgaagcgctcaacacattgatcacgcctggggccgatgtgcaggccctgcgccaggccgcagttacccacggcatgtgcagcttgcgcatggccggcatgcagaaggtcgcggcgggggtcaccacgatggcggaagtcttgcgggtgactcccggggattcggtaacaaatcctttgtttgtcaggcagtgaaaccgttcttatcggtgacaacaccgttacaatcggcccaacgtcgtttcactgacaccatcagatagggaatcgctatgcagatcggaaccgtactgcttcttttcgtgggtttggccatcgccatcctgttcatgggcttcaaggtggtcccccagggctaccaatggacggtcgagcgttttggccgttacaccaacaccctcaagcctggcttgaacatcatcatcccggtcatggaccgcatcggtcgcaagatcaacgtgatggaaagcgtactggatatcccgccccaggaagtcatcaccgccgacaacgccaccgtgcagatcgacgccgtgtgcttcttccaggtggtaaacaccgcccaggccgcctacgaggtcaacaacctcgaacacgccatccgcaacctgctgcaaaccaacatccgtaccgtgctcggctccatggaactggatgccatgctcagccagcgtgacggcatcaacgaaaaactgctgaagaccgtggacgaagccaccgcgccgtgggggatcaagatcacccgtatcgagatcaaggacatcagcccgcctgccgacctgatggccgccatgtcgggccagatgaaagccgaacggatcaagcgtgcgcagatcctcgaagccgaaggcctgcgcgcctcggcgatcctgactgccgaaggcaagaagcaggcacagattctcgaggccgaaggtagccggcaggcggcgttccttgaatccgaagcccgtgagcgtcaggccgaagccgaagcacgcgccacacaggtggtgtcggaagcgatcgcatcaggcaacgtgcaggcggtcaattacttcgtcgcacagaaatacatcgacgccctgggcaagctggcctcggccaacaacagcaaggtcatcctgatgccgctggaggccagccaggtgatcggcgcagttggcggtatcggcgagatcgtcaaggcaacgttcgacaacaagaaaggctgaggccagcgccatgtgggatttcctgcagcatctgtcgttctgggattggttggcactgggcacagtactgctgattcttgaggtattcggcgctggcggttacctgttgtggatgggtatcgccgcagccgccgtgggcgtgatcaagtttctggtgccacccctggggctggaatggcaacttctgctgtttgccgtgttgtcgataatgacggcggtgtactggtggaagcgtcagcgcagcagcgccaaggccagcgaccagccgggtctcaacgagcgcggttccgagctgatcggccgcaccttcgtggtgcaccaggcgattgtggatggccggggcaaggtaaaagtcggtgatggcgtatggatggtgaccggcccggacagccccgtaggcgctcaagtgcgggtggttggccaggaaggcgtggtgttaagggttgaaactgtttagtcagtgatggaactcggttgggctaactacaatcataaagtacagataacccacccggagtcacccatcatgcgtctcaaatatgctgtcgcaacccttgctgtgctttccctccctgtcggatcagccatggccgacagtttctggcgcaatgtcatctcgtcgggcgccaccaccggctcgacgtacctgacgttcaaggaccacaagctggtggtcgccgcccaagacgacgccggcagcttcgttgccagcgatggcggcatccgtggcccatacctggaagccgcgatgcagaaagtccgcgccgacaaccctggcctgcaggccacggacatggagctggccaacgctatcctcgcgaaaaatgcagtcaccgaataactcgggctcaataaaaatgccgctgttaacagcggcatttttttgtcctcaattcctacggtcatcatcgctgggcactacacgagcattgctgttttcccaactgcatacagagaagtcctgtcgagcctcactctgccgggccacaagctaaggattcctttttgaacaaagcgaatcactgcccatgcacaagattgcctacgcactgctgttctctgcatttgccaccgcctacgcccaggcagaaagctggtacggatcagccaaattcaacagcgctcgccagaacctctccagttcactgctcaccagcccgcgcgtgacggacagggtggacgccccggatagcagcaaagcattcgtggcctctttcgccgcaggctatgccttcgccaatggctggcgcctggaaggggagtacacgatgccaaacagttcgaccttcaaatcctactgggcccccttcaatgccaacgtcaacagcctgcatgtgcagagccagcgcttgatgctcaacggctataaagatatcccgatcaaccagtggctatcgttttacggtatggccggtgtgggcatcgcacgcattgagtccgaaggttatcaaaccattgagacccgtcgttttgccagcaaccgccaacataaccttgcctatagcctgggtattgggctggaggccaaggccagtgagcgactcacgttaggggcgggttatcgttacaccgccatgggcgacgtcgaaaccggttacaacaccttcacgaaccgcgcaaatgcacgggatgagcaactcaaaggcaaactcaaggagcagaacatgttcctggaagcgcggcttgccttctgattatttgcgaagaatgccgccttcgacgtggcattcttcggctcaatagtgacgattcattcacagatgacaggctatattcagtcaagccgtgcaaccatgccggtactgatacctcgcttactcatcgccaacctgaaacggatgccttcgtcgtcatgagccaactgcccttcctgccgttttccaaacccaccatcgatgaagccaccattgcagcggtcggcgatgtactgcgctcgggctggatcaccagcgggccgaaggtgcaggccttcgaagctcagttgtcggagtactttggcggtcggccggtgcgcaccttcaactcgggcacctgcaccatggagattgccttgcgcattgccggcatcgggccaggcgatgaagtcatcaccacgccgatttcctgggtagccacggccaacgtgattctggaagtgggcgctacgccggtgtttgccgatattgacccggtgacccgcaatatcgacctgtcccaggtggaagcggcgattaccccgcgcaccaaggcgatcatcccggtttacctggccggcctgcccctggatatgccgatgctgtatgcactggcgaacaagtacaacctgcgcattatcgaagatgcggcgcaggcgctgggttccagctgggatggcgagcgtattggcgccaccggggattttgtgtcgttcagtttccaggccaacaagaacatcacctcttccgagggcggctgcctggtgttgaacaacgccgaagaagcgcgactggcagaaaaataccgcctgcaaggtgttacccgtaccggcttcgacggcctggacgtggatgtattaggcggcaagttcaacatgaccgacatcgccgccgccattggcctggggcaatttgcccatatcgagcagatcactgctcaccgccagaacctggcgcggcactacttcaaatgctttggcagtgactttgaagagcagtacggcgcacaactgccgccggcagacttcgaaaacagcaactggcacctgtttcaactggtgctgccggaacgtcaggacggcctgccagcccgcgccaccttcatggagcaaatgcaggcccatggcgtcggcattggctatcactacccgccgatccacctgctgagcctttatcgggcacaggggttcaaggaaggcatgttcccggtggcggagaaagtggggcgcttgatcgtgtcgttgccgatgtttacggcgatgacagaggcggatgtggagcggtcggtggcagccgtgaaggcagttctacagccctaaaagcacattgcgggagccgtataaccggctcccgcaacaggatcactcgccgatggcggctttgtagccggcagcatccagcaatttgtccaggtcagccgggttgcttggcttgagcttgaagatccaagcgccgtagggatcagagttcagcagctccgggctgccactcagttcttcgttgacggcaatcacttcgcctgcaaccggggcgtagatatccgaggcggccttgaccgactcaaccacacccgcctggccagcagcgtcaaactgggcgcccacttcggccaactcaacaaacaccacatcacccaacgcttcctgagcatggtcggaaataccgacggtcacggtgccgtcagcttccaggcgtgcccattcgtggctttcggcaaaacgcaggtcggcagggatatcgncgatgtttncgtaccggcttcgacggcctggacgtggatgtattaggcggcaagttcaacatgaccgacatcgccgccgccattggcctggggcaatttgcccatatcgagcagatcactgctcaccgccagaacctggcgcggcactacttcaaatgctttggcagtgactttgaagagcagtacggcgcacaactgccgccggcagacttcgaaaacagcaactggcacctgtttcaactggtgctgccggaacgtcaggacggcctgccagcccgcgccaccttcatggagcaaatgcaggcccatggcgtcggcattggctatcactacccgccgatccacctgctgagcctttatcgggcacaggggttcaaggaaggcatgttcccggtggcggagaaagtggggcgcttgatcgtgtcgttgccgatgtttacggcgatgacagaggcggatgtggagcggtcggtggcagccgtgaaggcagttctacagccctaaaagcacattgcgggagccgtataaccggctcccgcaacaggatcactcgccgatggcggctttgtagccggcagcatccagcaatttgtccaggtcagccgggttgcttggcttgagcttgaagatccaagcgccgtagggatcagagttcagcagctccgggctgccactcagttcttcgttgacggcaatcacttcgcctgcaaccggggcgtagatatccgaggcggccttgaccgactcaaccacacccgcctggccagcagcgtcaaactgggcgcccacttcggccaactcaacaaacaccacatcacccaacgcttcctgagcatggtcggaaataccgacggtcacggtgccgtcagcttccaggcgtgcccattcgtggctttcggcaaaacgcaggtcggcagggatatcgctcataatctgtgtcctcaagaagtaatgtcagcggccattggcctgccggaaataggttagatcaaggttttgccatggcgcacgaaggtcggtttgaccactcgaaccgggtaccacttgccgcggatttccacttcggcccgatcagcggttgccgtcggtacacgcgccagggcaatggatttgctcagcgtaggagagaaactaccactggtgatctccccttcgccaatattggcgatacgaaccacctggtgagcgcgcaaaaccccgcgttcttccagcaccagcccgaccagcttgaactgcaccccggctgctttttctgcttccagcgcggcgcggccaatgaaattacgctcggcaggctcccaggcgatgctccaggccatgttcgatgccaggggcgaaacctcctggtggatgtcctggccgtacaggttcatccccgcttccaggcgcagggtatcgcgggcgccgaggccgatgggtgaaataccagcgcccaccaggtcattgaaaaagcccggagcctgatcagcgggcaaaacaatctccaggccatcttcgccggtgtaacccgtgcgtgcgataaaccagtcaccatcggcgtggccttcgaagggcttgagctggtgaatcagggtgctgcgcgattgcgtgaccagttcggcgatcttttgccgggcgtggggaccttggatggccagcatggccaactcggggcgctcatgcagttgcacctgatagtcgcccagttgcgcttgcatccaggccatatcctggtcgcgggtggcagcgttgaccaccagccgataagcggcctcggtgcggtagacaatcatgtcgtccaccacgccgccctgttcgttgagcatggcgctgtacaacgcacggccgcagccgtgcaggcgttcgacatcattggccagcaggtgctggagccattccttggcctgggggccgctgacatcgatcacggtcatatgagatacatcgaacaccccgcagtcgcgtcgcacctgatggtgctcttcaacttgcgagccgtagtgcaaaggcatatcccaaccgccaaaatcgaccattttcgcgccaagggcgagatgcaggtcatacagaggcgtacgctgtcccatgggtttctccttccgggcttggcgaaggtgcgcggagctactgtccgcactgaacaccttgatttacaaggcctgcagccacgtccagcgacccgctccgaaagacgaagcgcaccgaatgccgcgcattgtagccgcaagccgtaggactggcacctaaccgatttgccgggcggagcgtcggatcagcccgatcaccggcaacaggcccaccagcaccagggtcaacgccggcaaagaggcccgtgcccactcgccctcactggtcatttcaaagatccgcactgccagcgtatcccagccaaacgggcgcatcagcaaggtggcgggcatttccttgagcacatcgacaaacaccaggagtgctgcgctcaaagtacccggcagcagcaacggcagatacactttgcaaaacagtcgtgggccactcacacctagactgcgtgcagcttccggcagggacgggcggatacgcgccaggctgttttccaacggcccataggccaccgccaggaaacgcaccaggtacgccagcaccaatgccgacaggctgcccaacagcaacggcttgcccgccccaccgagccagctggagacaggcaccaccagttcacggtccagatagctgaacgccaacatgatcgataccgccagcaccgagcccggcaaggcatagccgacgttggccaggctgataccggaacggatcgcccgtgtcggcgccaggcggttggcgaacgccagcaccagcgccacgctgaccgtgatcaaggccgcgatgccgcccaggtaaagcgtgtggaggatcaggcccgaatagcgctcatccagatcgaagcggccgcgctgccagaaccaggccaccagttgcaacatcgggatgacaaacgcgcaggcgaacaccaacccgcaccaactgctggccgcggccgccttgaacccgcgcaggtggtacaacgccttactacgtggccgttcattgctcggtcggctggcgccccgggcgcgccgctcgccgtacagcaccagcatcaccaccagcagcaacaggctggccaactgggcggcgctggaaaggctgaagaagccgtaccacgtcttgtagatggcggtggtgaacgtgtcgaagttgaacactgagaccgcgccgaaatccgccagggtttccatcaacgctaaggcgactccagccccaatcgccggccgcgccatgggcagggccacgtgccagaacgctcgccatggcgattgccccagcacccgcgcggcctccatcaggcctttgccctgggccaggaacgcggtgcgcgccaatagataaacatagggatagaacaccaggaccaggacgatgatcacaccgctggtggagcgcacccgtggcaggcgcagcccggtgccgaaccattcacgcaacagggtttgcacgggaccggagaagtccagcaggccgacaaacacaaaggccagcacataggcaggaatggcgaacggcaacatcaacgcccaatccagccagcgccgaccaggaaactcgcagaggctggtcaaccaggccaggctgacgcccaacagggtcacgccgataccgacgcccagcaccagggtgagcgtgttgcccagcaggcgcggcatctgggtttcccacaggtgcgaccagatctggttgtcgatactttgccaggacagcaacagcacgctcagcggcagcagtacgagggcggcgacggtgaagaccggcaggtaccagcggcgttgggcggggtgggccaaagtcagttctcagtgaatgtctttaattcaactcaatccaatgtgggagggggcttgcccccgatggcggtggatcagtccatgatgagtgaactgatatcccgctatcgggggcaagccccctcccacattttgaccagcagtgtgtcagttccagccggcgcgatccatcaggcggatcgcctcagcctggcgcttgcccgccacttccaccggcaaggtgtccgccacgaacttgccccaggtcgccacttcggctgacggcggcactgccgggttggccgggaactcctggttcacatcggcaaagatcttctgcgcctcaggcgtggtcatccactctaccagcgccttggcggcttccggatgcggcgcgtgctgggtcaggccgatacccgacaggttcacgtgcacgccacggtcgccctggttcggccagaacagcttcaccgccaggtccggtttctgcttgtgcaggcggccgtagtagtaggtgttgacgatacccacgtcgcattgcccggcgttgatggcttcgagcacagcgatgtcatcggagaacacgtcggtggacaggttgttgacccaacccttgacgatctcttcggtcttggccgcgccgtgggtttcgatcagggtggcggtcagcgactggttgtagacctttttcgccgtacgcaggcacaggcggccttcccactgtttgtcagccagggcttcgtaggtggtgaggtcacccggtttcacccggtcggtggaataggcgatggtccgtgcgcgcaggctcaagccggtccaggtgtgttttgacgagcgatattgcaggggaatgttcttgtcgatcaccggggaggtgaacggttgcaggatccccatctgctcggcctgccagaggttgccggcatccacggtgagcagaaggtcggcggtggcgtttgcgccctcggccttgatgcgctgcatcagcggcgcttccttgtcggtgatgaacttgacctgcacgccggttttctgggtgtaggcatcgaagaccggcttgatcagctcatcgatgcgcgaggagtagaccaccacttcgtcggcggcctgcacagtggtgctgccgatcagggtgagtgccagggcagtcaggaggcgcttgggtgccaacatgggtgcggtctctcatttgcaaaaagagggcaaatgataaggactcacatttggtagtgcttggtagaggcgttaccagatgttgcatgacggagattggttgtgggctgatggcctcatcgggggcaagccccctcccacaagggatcgcatttcaatatcagggtttcgcaaggtccgggagatcgccagtcaggccgagagcctgacgcacaaacacggccttggcctcgggcatctggtcgaccatcttcaacccggcgttacgcaaccagcgcaacggcagttggtcggcctggaacagtcgctcaaaaccttccatcgccgccatcagcgccaggttatgcggcatgcgccgacgctcgtaacggctcagtaccttaacgtccgccaggcgctcgccgcgctcggttgccgccaacagcacctcggccaacaccgctgcatcgaggaatcccaggttcacaccctgccccgccaacggatgaatgacgtgagccgcgtcgccgatcaaggccaggccttcggccacgtagcgcttggcgtggcgctgacgcaacggcacacatacgcgtgggtcggcgctgatcacgttgccgagtcgtccctcaaaggcgcgctccagctcgcgacagaagctttcatcatccagcgccatcaagcgctcggactcggccggcgtggtcgaccagacgatcgaacaccaatcctcctgcccatcccgctccagcggcaaaaacgccagcggacccatatcggtaaagcgttgccacgccgtacgctgatgcggctggctgctgcgcacgctggtgacgatggcgttatgcaggtaatcccactcacgggtcgcggtgcctgtcaggcggcgtacggcggagttggcaccatcggcggccaccaccagcggcgcgcgcaacgtgcggccatcggccagggtcagcagccagtcatcgccggaacggcgcatctgctccaggcgcgcattggccagcaggcccaggtcgcagtcgtgcagacggtcaagcaaggcatcctgcaccacgcggttctcgacgatatgcccgagcacctcggcatgcacgctggcggccgaaaagtggatctgcccggtgccgctgccgtcccacacctgcatctcgccgtaagggctggcgcggcgcgagacgatgccgtcccacacgcccagccgctccagaatgcgctggctggcggccgacaaggcgctcacacggggttcgaaggcggcctcgcggtcgaacggcttgacgctcagcgggctgccgtcgagcagcagcacctgcaggccgctgccctgcaacgccagcgccagggcgcttccgaccattccggccccgacaatcagcacatctgcgcgcatgtccatgctttaagcctgtctcactggcggcttgcgccgcacgtaaagggttttgtcgacccgcgccaccagggtgccggagccgtcatgaatctgcaccttgaggtggggcaggtacttctcgccaccttcggtgtgtcgacggacctcgtccagcaaggcctcgtcgatggaaaattcggcatacaccgggcctttgccgggcgaaatgaaatcgatactcgcggccttgtcccacacgatgtagtcgcggcccaggttctccatcagcatcaacatgtagaacgggtcaaccatcgaatacaggctgccgccgaattgcgtgccgacatagttgcggttgtaccagcccaggcccatgcgcactttgacgtgacgaaaatcggcgctcatgtgctgaacgctgacccccgcgcccaggtacggcgggtacagggtcatgacccaacgcaacaatctcgccttgcccaggcgcgcgatcaaccacttacgcatcgggacgcgtgcccaggcccatggcttgccgggcgaaccagcgtttggcgggcggcaacaaatccagccccagcagccccatgtttcggcccagggcgaccaacggttgggcgctgccgaacaggcgcgtgacctggtcggagaagcccacggtgagtttctggtccaggcgctggcgctcgcgatagccctgcaaggtggccagatcacccggcacctgcggcccggccagcaaggcctcggccagggcattcgcgtcacgcagggacaggttgaaaccctgcccggcaatcgggtgcaggctgtgggcggcgttgccaaggatggccaagtgcgagcgcacttgctcctcggcttccaccagcgtcagcggatacaggtgacgggcgccaacctgcttgagggtgcccaggcgatagccgaacacaccctgcaattcactgaggaaactgcgttcatcgagattggccaggcgctgcgcatccatgccgatgcgcgtccagaccagcgcgcagcggttgtctggcagcggcagcaaggccatcgggccttcatcggtgaagcgctcgaacgcctcgccgttgtgggcttcgctcggggtgatgttggcgatcagcgcgctctggttgtaggggcgggttttcacgccgatgcccagttgttcgcgcaggccggagcggccgccgtcagccagtacagcgagatcgcactccagcacggtttcatcgttaagggtcaggcggtagccatcgggaagcggctccatgcgcacgacttcggccgggcaacgccagctgaccacgtctttgtccaggccttgccacaggcattggcccagccaggcgttttccaccacgtaaccgagggccggcacgccctcttccatggcagacaagcgcgcggtggagaaacgcccacggtcggacacatggatctgcttgatcggctcggcgcggcgggaaatgtcctgccacaggcccaggcgctggtagatctgccgggcaccgaaggacagcgccgaggaacgcgcatcgtagctcggctggtagctgtcgcccggcgcgaagggttcgatcagcacgatcttccagccccgggccttggccccggcctgcaacgccagtgccaggctggcgcccaccaggccgccgccgatgatcgccaggttgacccggctcatcgcgcagccgccatcagcgcttcgatatcggcgacagtcttgggcacgccgccggtcaggatttcacagccttgcttggtcactaccacgtcgtcctcgatgcgtacgccaatgccacgccatttctttgccacgttctggttgtccggtgaaatgtagatccccggttccacggtcaacgccatgccgacttccagcacacgccattcaccgcccactttatattcgcccacatcgtgtacatccatgcccagccaatgaccggcacggtgcatgtaaaacaccttataggcttcgctggcgatcagttcgtcgacgtcaccctgcaacaaccccagcttgaccaacccggcggtgatgacccgtacggtcgcctcatgggcctggttccaatgcttgtccggggcgatctccgcgaaggcggcttcctgggaggccagcacaatctcgtagatcgctttctgttccggcgagaacttgccactgaccggccaggtgcgggtgatgtcgctggcatagcagtcgatctcgcaaccggcgtcgatcagcaccaggtcgccgtccttgagcaccgcgtcattctgctggtaatgcaggatgcagctgttgcgcccggcggcgacgatggaaccgtaggccggcattttcgcgccgcctttgcgaaattcataatccagctcggcttccaggctgaactcgtacagcccggcccggctggcctgcatcgccttcacgtgggccgcgcaagagattcgcgctgcctcgcgcatcaccttcacttccgccgccgatttatacaggcgcatgtcgtgcaacagatgatccagggcaacgaattcgttcggtggctgggcgcccaggtgggccttggagcggatcacgttgatccactccatcaggtgccggtcgaactcggcattgctgcccatggccgagtacacccggtcgcggccttcgataaggccgggcaggatgtcgtcgatatcggtgatggggaaggcatcgtcggcgccaaagtcacggattgcgccttcggtgccggcgcgcaggccgtcccacagttcgcgttcggcgttgcgttcgcggcagaacagcacgtactcgccgtgctggcgaccgggcatcagcacgatcaccgcttccggctcggggaagccgctcaggtactggaaatcactgtcctggcggtacacgtgttcgacatcgcgattgcggatcgccacggcggcggccggcaggatcgcgatgctgttgggttccatctgcgccatgagcgccttgcggcgccgggtgtattccgctttggggatatggatcatgggcagaggagtttcctttcttagtgcagcgacggcttgggtgcagccggctcagccgattttttggtctcggtgaacagcagcagcggcgcgacgcgcaggtattccatcacttccatgtagtcaccctcgccgtcttcggactcttccagggcgtcttgcacctgggagatggctgccaggtcctgcagcacttccttggcatcggtgctcagttccaggccgccggcgttcacgccgaagccgtggaggaagccctggcaccattggcccagtgcggcggcacgctcggctagcggcgcgtcgtcggtcggcagcagcaggaccacggtgacgtcatcaccggtcagctcgcccttgaccatctcttgtaggccgatcagcgcgttgcgcacgttgtcggtcggttcggtttccagcagctcggccacgtcggccagccagttgtcggcgtcgaagccgacgccggtgcagctacggcccagcaacacgccgtgcaattcggccggcgagcaggggtggccgctggtgctcagcagtttggagaaagcatcgtacggggagttctgaataggcatggtgagctaggcgccagacggcgcaatgtctagaatggagcgctgtatcctagcaccggcagacgtaccaagactatcaagggcgtcagatcgtttatcctgcagttgccattcatcagacaaatccagtggaacccaatggaagacaccgacctgcaagcgctgatggccagactcgaattgctaattactcgggtcgagcaacttaagagtcaaaacggactcctattagctcaggaaaagacctggcgcgaggaacgcgctcacctcattgaaaaaaacgaaatcgcccggcgtaaggtcgaatcgatgatttcgcgcctgaaggccctggagcaagactcatgagttcaagcaatagcgtcaccgtgcagatcctcgacaaagaatattcgatcatctgcccccaggaagagcgcaacaacctggtgagcgccgcccgctacctggacggcaagatgcgtgaaatccgcagcagcggcaaagtcatcggcgccgaccgcatcgccgtgatggccgccctgaacattacccacgatttgctgcataagcaggaacgccctgacgtgcaggccagcggttcgacgcgtgagcaggtgcgtgacttgctggagcgtgtcgatctggtgctttccagcgatgcagacgcacccaagggctgattgccgcgactgtttaaggtatactcgccccactccctggcgtgtttgccagtcggcgatgtccctgagccgattcgcactaccctggaagttgcacgttgggctggtgtgcatgtccgctagacggaaagccttaaagcctactgcatcttccaccttgaactttcgggttcaagggctaagtcgacagcggctctgtcggggagcctgaattcccaaactcaatgccagtcttcggactggcattgttttatgagccgaaaccatgaccgaacctgcgccgctttcccgtccgcaacttcgacgcatgttgcgcaaagcccgccgcgccctcacgccgagcgagcagcgcaaggccgcccacggcctgtatcggcaactggcacagcacccgctgtttcgccgggccaaacatatttccttatacctaccgacggacggtgaaatcgatccgcgcttgctgctgcgtgcagcacagcgccggggcaaggccacctacctgccggtgcttagcgcctggccacgtaccaagatggtgttccaacgggtcaagcctggtgagaagctgctgcccaatcgctttcgcatcctggaaccacgggtgaacatcagccgccaacgcaaagtctgggcgctggacctggtgctgctgccgttggtgggttttgatgatgccggcggacgcctgggcatgggcggcgggttctacgaccgcagcctggcttacctggcgcgccgccagagctggcgcaagccgacgctgctgggcctggcccatgaatgccagaaggtcgatcgattggcgcaggcgagctgggatgtgccgttggcgggcaccgtcaccgataagcattggtatattgcgaagacgccactggagtcagcggcgccttgaagaagggtcagcgcttgaacggttgcggctgctgctgagccagttcaacgggcgcatcggtcttgttcgaccacaagctttgggcatacccggtggtcacgacgcccagaccaaacaaaatcaccaaaatccatagtaaatccggtttacgttgcatcgattgccccccttcaggcacctcgtacacgatgacaacaacgttccaaagagtccgttgcagctgcgtcaagctttaaaagccggcattctgcggtaacgtgaaccaacacgcaaaccttggcgccaaccgactgtcggtttgtcatcaaattgcaggacaacttgcccaccgcttatttcaggagcccaacaatggcctattggctgatgaaatccgagcccgacgaactctccatcaaaggcctggaaaagcttggcgaagcccgctgggacggggtacgcaactaccaggcgcgtaacttcctgcgggccatggcggtgggtgacgaatttttcttctatcactccagttgcccggagccgggcattgccggcatcggcaaaatcatcgaggcggcctatccggatcccaccgcgttggagcccgaaagccactacttcgacgccaaggccaccccggagaaaaatccgtggagcgcgatcaacgttgcccatgtgcagacctttcccaaggtgctcggcctaggctacctgaagcaacaagccgccctcgccgaactgcccctggtgcaaaaaggcagccggctgtcggtgatggccgtcacgcccgagcaatggcacgccgtgatccatttgatttgactgaccggcatcaacgccccaccggggcaaaccgctcacactaggacgctaacgccgcaggaagcagccatgtcgacgaaccaccacacctcccgccttttcgccgttgccctcatcgccctgttgctgggtgccggtggcttcggttactggcgctccacccaggaccgcctgcccgaaggcctgagcatgggcaatgggcgcctggaatccaccgaagtgcagatcgccgccaagatccccgggcgcctggccgaagtgcgggtagacgaaggcgacaaggtgctcaagggccaactgcttgcacgcatggacacccgcaccctcgaagcccaacgcgcccaggccgaagccgaagtgctgcgcgccaaggaaaacttcgccgccgccgaggccaacgtgcaactgcgccagagcgagcaactgctggccaaccaggaactcaagcgcacccaggagctgtacaagcgcggcttcgccagcagccagctgattgatcaacagcaggcgcgacagaacaccggcaacgccgccgtgattgccgcgcaggcccaggtcaattcggtaaaggccgccattggcgccgccgaggcccaggtcgcccagctcaccagcgagatcgacgacagcagcctgcgcgcgcccatcgacggcgttatccagctacgcctggccgagccgggtgaagtgctgggcgcgggcggccgtgtactgctgttgatcgatcccaatgatcaacacatgaacctctacctgcccgcttccgtgaccggccgtctcaccgtcggcagcgacgcacgcatcctgctcgacgccctgcccgaccagccgctgccggccaggatcagcttcgtcgccgccaaatcccagttcacccccaaggaagtggaaacccgcgacgaacgccagaaactggtatttcgcgtcaaactgcgcctgacccaacccagcgctgtgccccaggccaaaccgggcatgcccggcgccggctatgtgcgcacggctgacatcgactggccggccaacctgcaatgaccgccctggcgctgcaggccacggggatcaaccaccgctacggcaaacagcaggccctggtcgacatcgccttcagcctgccggccggtacgcgctgcgggttgatcgggccggatggcgcgggcaagtcgagcctgctgggtttgatcgccggggttaaaaagctgcaggacggccagttgcaggtgcttggcggcgccatcgacgatcgccgccaccgcaacagcctgtatccgcgcattgcctttatgccccagggcctgggcggcaacctgtaccccgagctgtccatcagcgaaaacatccgtttctttgccacgctgttcggcctgtccaaagccgattgcgaccagcgcatgcacaacctgctgctggccaccgacctcgcacgcttcgccgagcgcccggccggcaagctctccggcggcatgaaacagaagcttggcctgtgctgcgcgctgatccacgacccggacctgttgatcctcgacgaacccaccaccggcgtcgacccactgtcacgtcggcgcttctgggaactggtcgacagcgtacgcagcgaacgcccgcaactgacattgctggtggccacggcctacatggaagaagccgagcagttcgaacactgcctgatgctcgatcgcggcaagctgatcgccgatggcctgagcagcgacttggccgccgcgacacccagcggcaaattggacgaagccttcacccacttccagggtgacagcgcccacgacaaccagccgctggtgattccgccgagggagagcgacaacaccgatgtcgccatcgaggcccatgacctgaccctgcgtttcggcgatttcaccgcggtgaacaaggtcagctttgcgattggtcgcggcgagatcttcggcttcctcggctccaacggctgcggcaagaccaccaccatgaaagtcctcaccgggctgatgccggccaccgagggcagcgcgacgctgctgggcaacccggtgaacgccaaggacctggccacgcgcaagcgcgtgggtttcatgtcgcaaagcttttcgctgtacggcgaactcagcgtgcgccagaacctggtgctgcatgcgcaactgttcgacctgcccaaggccgacagcggaccgcgcattgatgagctgatccagcgtttcgacttgggtgacgtcgccgaacaaccgtccggcgagctgcccctcggcctgcgccagcgtttgtcattggcggtggcggtgctgcatcgcccggaagtgctgatcctcgatgagcccacctcgggcgtcgacccagccgcacgggatgacttctggcgattgctgatcgagctgtcccgcgaacaaggtgtgaccatcttcctgtccacccacttcatgaacgaagcccagcgctgcgaccgcatctccctgatgcacgcgggcaaggtgctggcctgcgatacgccggatgcgctgcaacagcaattccacggcgatacgttggaagccgcgttcgtcacgtgcctggaacaggcccaaggtgaagccgaacccaccgcgccggccaagaccgtcagcgaaaccagcacagcgccagtgagtaaacgcggtttcagcctggcccgtctggtagccgtggccagccgcgaaggcaaggaactgctgcgcgacagagtgcgcatggccttcgccctgctgggggcgatgttcatgatggtgatcttcggctatggcatttccctggatgtggaaaacctcgccttcgccgtctacgaccaggaccagacgccgcaaagccgcgcctatctggaggcgtttcgcagttcgcgctatttcgctgagcaagcgccgatccaggactcgactgaactgcaccggcgcctgcaacgttcggaaatcaaactggccctggagatcccgcccggctttggccgcgacctctacgccggccgccagcccacggtggccgcgtggctggatggcggcatgccgtttcgcgcggaaaccagccgtaactatgtcgaggccgtgcaccaggagaacctgcagcaactggccgaactgagcagcctgccgcgcaacaccccggccgccgccaggctggaaacgcgctttcgctataaccaggacgtggtcagcgtaaacgccatcggccccggcgtgatggcgctgatcctggcgtttatcccggcgatgctcaccgcgctcggcatcgtgcgcgagaaagagctgggctcgatcaccaatttctacgccacgccgctgacccgcctggagtttctattgggcaaacaggcaccgtacctggccgtgagcctggtcaacctgacggtcttggtggcgatgaaccgctggctgttcggcgtgcccttcaagggcagcgccctcaccctggcgttcggcggcctgctctacgtgctggcgaccaccagcatgggcctgctgatttcggccttcacccgtacgcagatcgcggcgatcctaggcaccatgatcatcaccagtctgccgaccatccagttctccgggctgatcgtgccgcgctcgtccctggaaggcgcggcggccttgatgggcatgctgtttccggccgggcacttcctggacattgccgtgggcaccttcaccaaggccctggacctgcgccagttgtggccgcagtgcctggcgctgttcgggttcttcgtcgggtttaccgggctgagcctggtcatgctcaagaagcaggaggcctgatgcataagttcgcgcacattctgcggctggggatcaaggaactgaccagcctgcgccatgacagcgtgttgctgctgtttctgttctacgccttcaccgtcgccatctatatgcccgccgccggttcggtgatcggtgtacacaacgccagcgtggcatttgtcgatgaagaccacagcgctctctcgcggcagatggccgaagcgctgcaaccgcccgaattccaggcgcctgcaccgttggcctatgaccaattggacagagtcatggacagcggcaagtacactttcgtaatcaatgtgccggcgaatttccaggccgacctgttggcggggcgccagccgggggtgcaggtgaatgtggatgccacggcaatgagccaggcgttcatgggggcgggctacatcgggcggattttccagcgcgaactgctgacctacagcggacaagccgatgccgccagccgggcacccgcgcagctcactacccgggcgctgttcaataccaacctggaaggcggctggttcctggcggtgatccagatcgtcaacaacatcaccatcctcgccattatcctgaccggtaccgccctgctgcgtgagcgtgaacacggcaccctcgaccacctgctggtactgccgctgacggcgctggaaatcatgctggcgaaaatctggagcaacatgctggtggtggtgctgtgtacctggctgtcggtggaactggtggtcaagggcctgcttggggtgccgctggccggctcgctggggttgtttctgttcgtgaccgcgctgtacctgtttgccagtacggcgctggggattttcctggcgacgcttgcccgttccacaccgcaattcggcctgctggcaattccagtgattatcccgatgctgttgctctcaggcggcagtacgccgctggacagcatgcccgagtggttgcagtgggtgatgcaggggtcgccgtcgacgcattttgtgagtttgagtgcggcgattctgtttcgtgatgcgggggtgagcgtggtgtggccggatttgctggcactggcggggattgggttggtgttttttgcggtggcgttggcgcggttccgcaaaagcctcgcctcataagcctggatccggcttgttgtggtgagcgggcttgccccgcgctgggctgcgcagcagccccatcagactcaccacatttcttcaggcacaccgaggtgtatggttttggggcggcttcgccgcccagcgcggggcaagcccgctcaccacagaagccaggcccataacacttaggaggcttactggatgatcaggttgttgaacaacagatcttccaccaccggcttgcccgtctcgtcattcatcacttgctgggtctgcttcagggcttcctggcgcagtttttctttgccctcgacggtgctcatcgcctcgttggtctgctgggtgaacagggccaccaactggttacggatcaacgcatcgttggctttgacggcggcggccgcttcggtgccggtcacgcgcagggcaatgtcggccttgaacaccttgagtttcgccgtgccatccaggccgtagttgcccacgaacggcgggctcaggctgatatagctgaccttcggcgcctcgccctctttggcttcttcggcctgggccgccatcggcaaggtcagggccagcatcaacaggatccacgctttcacagttcattcctcacattcggttgccgggtagcataacgctagcaaggcagagcacaagcttatggcggcttatcaggcctgggcatgctcgttgacccacgggcgtaccctcctacacttatcggccacgacgccaaaaggaatagtccgatgaaagctgtgctgtgcaaagccttcggccctgccgaaaccctggtgctggaagatgtcgcaagccctgcgatcaagaagaacgaaatcctgctggacgtgcacgcggccggggtcaactttccggatacgctgatcattgagggcaagtaccagttcaagccgccctttccgttctcgccgggtggcgaagcggctggcgtggtcagtgaagtgggcgaaaaagtcggccacctgaaagtcggtgaccgagtcatggcgctgaccggctggggcagctttgccgaacaggtcgcggtgccgggctataacgtactgccgatcccgccgagcatggatttcaacaccgccgccgcgttcagcatgacttacggcacgtcgatgcacgcgctcaagcaacgggccaacctgcaagccggcgaaaccctgctggtgctcggcgcttccggtggcgtgggcctggctgccgtggaaatcggcaaggccatgggcgcgcgcgtgatcgccgccgccagcagcgccgacaaactcgcggtggccaaggccgccggcgccgatgagttgatcaactacagcgaaaccagcctgaaagacgagatcaagcgcctcacggacggcaatggtgccgatgtgatctacgacccggtgggcggcgacctgtttgaccaggccatccgcgccatcgcctggaacggccgcttgttggtggtggggtttgccagcgggcgcataccggagttgccggtgaacctggcgctgctcaagggcgcggcggtggtcggggtgttctggggttcgtttgcccagcgccagccgcaggataatgcggcgaacttccagcagttgttcacttggtacggtgaaggcaagctcaagccgctggtgtcgcaggtgtatccgttggaacaggccgcccaggcgatcaatgaccttgggcagcgcaaggcggttggaaaggtcgtcgtccaaacccgctaaaaatttgaaataccgtcaatgtgggagggggcttgcccccgatagcggtgtgtcagtcacagctatacagactgataaacagctatcgggggcaagccccctcccacttttcgatctccggtgttcgtaagggaacattcattagcgttcatttctggttgtttatagataagaggcgatgctattttcggtaacgaaactgtaacattcgcatccgcagtcaaaacaagaaatctggagctcttgaatgtttgctttctttcgtcctgccgcacatcaggcgcccctgcctgaagaaaaaatagacagcacttaccgacgcctgcgctggcagatcttcgccggtattttcttcggttacgccggctactacctgctgcgcaaaaacttctccctggccatgccctacttgatcgacgagggttacacccgcggcgaactgggcctggcgatgtcggccatcgcgattgcctacggcctgtccaagttcctcatgggcctggtgtccgaccgctccaacccgcgctacttcctgcccttcggcctgctggtttccgccggggtgatgttcattttcggtttcgcaccctgggcgacgtccagcgtgaccatgatgttcattttgctgttcatcaacggctgggcccaaggcatgggctggccgccgagtgggcggaccatggtgcactggtggtcgcagaaggaacgcggcggcgtggtgtcggtgtggaacgtggcgcacaacgtcggcggcggcctgatcggcccgctgttcctgctgggcatggcctggttcaacgactggcatgcggcgttctacgtaccggctaccgtggcgttgctggtggcggcgtttgccttcatcaccatgcgcgacaccccgcaatcggtcggcctgccaccaattgagcagtacaagaacgactacccggaaggctacgacgccagccacgaagatgaattcagcgccaaggaaatcttcgtcaagtacgtgctgcgcaacaaaatgctgtggtacatcgccttcgccaacgtgtttgtctacctgctgcgttacggcgtactggactgggcaccgacctacctgaaagaagccaagcacttcacggtggataaatcgtcgtgggcgtacttcttctatgagtgggcgggtatcccgggcacgctgctgtgcggctggatgtcggacaagatcttccgtggcaaccgtggcctgaccggcatcgtgttcatggcgctggtgaccgtggcgaccctggtgtactggctcaatccgccgggcaacccgatgatcgacatgattgcgctgttctccatcggcttcctgatctacggcccggtgatgctgatcggcctgcaggcgctggaactggcaccgaagaaagccgccggcaccgctgctggcttcaccggcctgttcggttacctgggcggctcggtggcggccagtgcggccatgggctacaccgtcgaccatttcggctgggacggcggtttcgtgctgctgatcggcgcatgcctgctggcaatcgccttcctgatcccgacgctgtggcacaccaacagcgtcagttcggcgcgctaagcacctgagcaaccctttgcacaacgcttgagccgcgcctccaggttcttatctggcatggcgtggctgcgcagggcgttgacggtctgctcgacataatcgcgagtggtgccgtaacgcccgcaagcactttgcagcacatggttcagtacgatatcgggcaagttaccggcgtagctgggcaagtgccgctccaacacaaaccccagcgcctgtacggtactgccatcttccagacggcagctgagccagtgtggccggtaggacgggtaaggcatctcgcgctgccacagggcgtacagcgaggcttccagctgatcttccggcaaacggtaggcaaacccgctgcaggagcccccacgatccaggccaaagaccagccccggcagctccggcgtaccccgatgctcatgggaccacaggtacaggccccggtgataaccgtggacccgtgcccgcacccgctcggtcgaggagcattcagggcgccagatcagcgaaccataagcgaataaccagaccggcccacccttatgccgcgccatggtggcctgcatcgagctcatcaactgttcgtgagtgagttgcggcccaagatcgagccgcggagggtaagccaattgcaaaagatcggattcaataacggtcatggcaaatcgcttaggtctcctgtgctttaccagttgtaggcaactttaccgtaatagaacgcaccgctgtaaccgtacggcgaaaaagtgctataggccaaattgccaccgctgctggcgaaggcattgaccttctcagggtatttatcggtaacgttgtcgccacccagggtgaaggtccagttcttcaacttatagtccgccgacaaatccagcacccaggccgccttgaaggtctggtcgttgaccttgtctgcctggtagctggtgaattcaccatagcgcaccaggttgctgtgcagcgcccaattgccgaatgtgaagtcgttacccaggctcagtttgtgctcaggcgtggtgtcgcccagcaagccgctcttttcgcgacggtccacccgcaccaggttggcacccaggctatcgaggatggccgggttgggcttcacgtccgtcacccgggtatggttgtagttgtagcccacggtgctgttccagcggatgccgttatcgaattgatagcgatagttggccaccaggtcgacgccgtcggtgctggtgtcggtggcattggtgaagtagcgggcggtggtgtagttgatattgccgacaccgttggcgcgcagataggcctgggtggccgggtccagattgaggttggacgacaggctgatacggtcgcggatatcgatgcggtacacgtccacggttactgtcaggtcgtcggcaggctccagcactaggccaaggctatagttgcgcgacttctcggccttgaggtcttccgcgcccagcaggcgggccacctggctcgatgccgggaaagtgccggcctcgcggatgtcactgccgatcaactgcgacgaggtaaacgcaaagttctgctgcgccagggacggtgcgcggaaacctttggagatactgccgcgcaaggccacctgcggggtgaagtcgtaacgggccgacagcgaaccgctgacattggagccaaagtcactgtaatcctcatgccgcacggcggccgatgcgctgagtttttcggtgaagttggtttccaggtccaggtactgggcccagttgtggcgcgaactgctgccggcgtcggcatcacggaagccgccgaggcccgagctgccggtctggtagtaggacgccggttcacccgcttcaatctcatacccctggcgcaggtattcaccgccaaaggccacggagaccgggtatggcaggaagcccacgtcgaactcacgggacaggtcgaggctgacttgcttctggtcgttgctcagggtgccgttgtcgaacttgcgcggcgtggccaggcccagggaggtgttgatggtttcggtgctcaactcgtactggttcttgccgtagttggccgagaggtcgtagtgccagtcgtaggcaaacagcccgcgcaggcccaccaccagcgaggtgtcctccaggttgcccttgatcaacggcaggtagccgttggggttgagcgccgcaatgttgttggaagcgttgctcgcccggtagaacgccgccgtctcgccgcgccgcttgctgtagccgccgaaagtgtagaactcggcggcatcgttgaacgaatattccgagttgaactgcaacttgccttcattggtggccggttcgccctggcggaacacgcgctggccgtaggtggtggagccgacactggctgggcggtaatcattgccggcacggttggtgtaatcgttatcggcaccttcggccgagaggttgatgaagccgctatcacccaatgccaggccggtattgccgctgacattacgctggataccgtcgcccttcttgtattcgccgaacttggtagagatcgagccgccatggtcggcgtgcttgaggatcacgttgatcaccccagcaatggcgtccgagccgtagcgcgcggaagcgccatcgcgcagcacctcgatatggtctaccgccgacagcgggatcgcgttcaggtccgctggcgccgagccgcgtcccaccgcaccgcccaggttgacgaacgcgctggtatggcgacgcttgccgttgaccagcaccagcacctgatccggcgacaggccgcgcaactgcgcaggacgcaccagctcagcaccgtccaccaggctcgggcgcgggaagttgatcgatgggatcagccgcgccagcactgcgcctagctcatcggagccggtgctgcgcagggtgtcgccggaaatcacatcgatgggtgacagcgaagcactggccgtacgctcctgggcgcgggtgccggtgacgatcacggtgtcgagcttgggtgtatcggtggccgacgtttcggccgcgaagacaggattgaaacccacggcggccagcaaattggctgacaaaatcgccgtgtacagcgcgtgttgcttgtagctccccataccgctcccctttgaatcaaaaaccagaacgtcgtgctctgagttcttacgatcgatccgactggcgggcggtggcggtcagtgattagtggttgtgaaagagtcggtagtccgttgcgatatagcttaaggatatttatgtaacaaattaaatacctttaaagcataagtgattgcataagcaaactcgcccattcatcaggattgcgcgggccaatcccggtagtttcagccccggttcagcctgggaacgtgccaaaccgtcaaaatggcgcccaccttatgacccacctagccgagcatcaaaccgactatcgaggtcgcacccatgaaaaaattccgactgcctggcctgctgttcctggcccaggccaccaccgccctggcgggcgaaacaccggccaccgaggacgacaaaggtttctggtacgcgcagaccagcgtctacacccggcactttgcgccggacccggaccacaacaacaaccaggacctgatcggcctggagcgcaatgaagcctcaggctttgtgtatggcggggcgacgtttcgcaactcgttcagccagcgctcgtactacgcgtacgcgggtaaacgctacgacatggccgactatccggtgtatttgaaactgacgggcggggcgatccagggctatcgcggcaagtaccgcgacaagatcccgttgaaccgtttcggtgtggcgccggtgatcattccgtcggtgggcacgcattacgggccagtggcggcggaattggtgttgctggggttcaacgcagcgatggtgacgaccggcgtacgattttaagcacgcggcgcataggcaaacacgtcggcgcgcatctggtgcgcatccatgccggcttcgaccagcgcatccagggtgccatagatcattgccggcgagccgctggcgtagacgtgcaccgacttgaggtcggcaatgtcttcgcacaccgcttcatgcaacaacccgcagcgcccttcccaaccgcacaggtcgctgacgactttgtgcaaaaacaggttgggcagttgcaaccattggtcccagtgttcgatctcgtagaaatcttccgggcggcgcacgccccagtacaggtgcactgggtgcttgaagccggaggcgcggcaatgttcgatcaggctgtgcatctgcgccatgccggtgccggcggcgatcaacaccagcggcccgtccggcagctcggccaagtgggtgtcgccaaacggcagctcgacgcgagccatctggttgcgttgcagttgcgcaagcaaagtgcgggcactgtcctcgcgggccagcacatgcaactccagctcacgtccggcatgaggcgcagaagccagggagaatgcggatttctcgccgttctcccgctcgatcatcaggtactggccggcgtggtaacgcaccgccttgccggccggtgcacgcaggcgcacccgccacacgtcgccaccgacctctacgcattcactcaattggcacgacagtttgcgcaacggcaactctcccggcgccagcacgccatcccacaacacaacgcaatcttccagcggctcggcaatgcaggtgtagaactcaccgtgatcacgcacttcaccggcctgctgtacgcggccttccaccaacagcgcggcgcacacatggcacacgccgttgcggcaggcctgtgggcactcgtagcccaggcgacgcgcgccttcgaggattcgctcgccagggaccagttccagcacggcgccggaaggttgcagggttacacgcatcaatctattcccaattctttccagatcgcatcgacacgggcggtgacggcttcatccttgacgatcacccggccccactcgcgggtggtttcgcccggccatttgtgggtggcatccaggcccatcttcgaacccaggcccgacactggcgacgcgaagtcgaggtagtcgatcggcgtgttgtcgatcatcaccgtgtcgcgcttggggtccatgcgcgtggtgatggcccagatcacgtcgttccagtcgcgggcgttgatgtcgtcgtcggtgacaataacgaacttggtgtacatgaactgtcgcaaaaacgaccacacaccgagcattacccgcttggcatggcccgggtacgacttcttcatggtcacgatggccatgcggtacgagcagccttccggcggcaggtagaagtcggtgatctccgggaattgcttctgcaggatcggcacgaacacttcgttgagcgccacgccgagaatcgccggctcatcgggcggccggccggtgtaggtgctgtggtagatcggcttgatccgatgggtgatgcgctcgacggtgaagaccgggaagctgtcgacttcgttgtagtagccggtgtggtcgccgtaagggccttcatcggccatttcgcccggatgaatcacgccttcaaggatgatttcggcggtggccggcacttgcaggtcgttgccacggcatttcaccagctcggtgcggttaccgcgcagcagaccggcgaaggcgtattcggacaggctgtcgggcactggggtcacggcaccgaggatggtggcggggtcggcgcccagggccacggagaccgggaacggtttgccggggtgcttttcgcaccactcacggaagtccagcgcgccgccacggtggctcagccaacgcatgatgaccttgttgcggccgatcacttgctggcgatagataccgaggttctggcggtccttgttcgggcctttggtgacggtcaggccccaggtgatcagcgggcccacgtcaccgggccagcaggtctgcaccggcagcatggcgagatcgacgtcatcgccttcgatgaccacttcctggcacaccgcgtccttgaccactttgggtgccatggcaatgatcttgcggaagatcggcagcttcgaccaggcatccttcagccccttgggcggctcaggctccttgaggaaggccagcagcttgccgatctcgcgcaattcgctgaccgactcggcacccatgccaaaggccacgcgttcgggcgttccgaacaggttgccgagcaccgggatatcgaagccggtcgggttctcgaacagcagcgccgggcccttgttgcgcagggtacgatcgcaaatctcagtcatttccagcaccggggaaatcggcatctggatacgtttcaactctccgcgctgctcaagttgctgcacgaaatcccgaagatccttgaatttcattaaccatgccacccgtaaaataggcgtacatcctacctgctccagggtgcgtttgcctgccagcagcgcttaaaaaacgggcacaaaaaaatggcgcccctgggggcgccattcttcaggacctgaaacgtcgtattacttacgcttcatcgacaggaagaactcgtcgttggtcttggtggttttcagcttgtcgaccaggaactcgatggcggctacttcgtccatcgggtgcagcagcttgcgcaggatccacatgcgctgcagctcgtcgtcagcggtcagcaactcttcgcggcgggtgccggaacggttgatgttgatcgccgggaacacgcgtttttccgcgatgcgacggtccaggggcagttccatgttgccggtacccttgaactcttcgtagatcacttcatccatcttcgaaccggtttcaaccagtgcggtggcgataatggtcagcgagccgccttcttcgatgttgcgcgcggcgccgaagaaacgtttcggtttctccagggcgtgggcatcgacaccaccggtcaataccttgccggagctcgggatcacggtgttgtaggcacgggccagacgggtgatggagtcgagcaggatcaccacgtccttcttgtgttcgaccaggcgcttggccttctcgatcaccatttcggcaacctgcacgtggcgggttggcggctcatcgaacgtcgaggcaaccacttcgccgcgcacggtgcgctgcatttcggttacttcttccggacgttcatcgatcagcagcacgatcaggtgaacttcaggattgttacgcgcgatgttcgctgcaatgttctgcagcatgatggtcttgccggctttcggcggcgcgacgatcaggccacgctggcctttgccgatcggggcgcacaggtcgatcacacgaccggtcaaatcttctgtggaaccgttaccggcttccatcttcatgcgcacggtcgggaacagcggggtcaggttctcgaagagaatcttgtttttcgcgttctcgggacggtcgaagttgatcgtgtcgaccttgagcagggcgaaataacgctcgccttccttcggtgggcggatcttgccaacgatggtgtcaccggtgcgcaagttgaagcgacggatctggctcggcgagacgtagatatcgtctgggccggcgagataggacgcgtcagcagagcggaggaagccgaagccgtcctggagaatctccagcacgccatcaccggagatttcctcgccgcttttcgcgtgcttcttgagcagggagaaaatcacgtcctgcttgcgcgaacgggccatattttctatgcccatttcttcggccaattggagcaggtcggtaatcggcttttgcttgagttcagtcagattcatataggaatgacgtaatcatttatggaggggggaaattaagcttttggcttaatgaggccgcgccgcagagaaggcgacaggatcgcgtactaatcgaaaaggaatgcgtcggcgacggcttgcagggggcagtggagaaaccagtgcggggccgaatgtaccacctgagtttcggagcgtctagccctgtttcacgaaaaagccccgctatttgcggggcttttttgacgacgcttagatgttcgcgtcgaggaaagcttgcagctgagacttcgacagcgcgcctactttggtcgcttcgacgttgccgttcttgaacagcatcagggtcgggataccacgcacgccatgcttggcaggggtttcctggttatcgtcgatgttcaacttggcaatggtcagcttgccttcgtaggtagtcgcaatgtcgtccaggactggagcgatcattttgcaagggccgcaccattcagcccagtagtcaaccagcaccgggccttgagccttgagtacttcggcctcaaaggtcgcgtcggtgacgtgcttgataagatcgttgctcatggatgtctccggattgtaagcaaaaaaaacgtggcccatcatagctgcccttcccccgttcaggaagccgcctctgattgagtcttcctatgatggcccatgagtttgggtatcgcccaactcagggcgtgacgggggtcacgaaggcaataccggtgcgcaacgccgcattgcgcacgtgttcctgcatggttttctgcgccgccgcgctggcgcgtcgggccagggcgcgcactatccggcggtgctcctgccaggtttccatggcccgttccggtcggatgaacggtagcttctggctctccagaaaaacctcggcactcgcgctcaggatgctcaccatcgcctggttgccactggcgagcaggatgcgctggtgaaattcgaagtcgagccgggcggcggcttcgaagtcgccggccttgaggaccttgcgcatggcctcgacattgtcttccaggctgtccaactcatcgatggtcagcgtcaccgccgccagccccgccgcaaaaccttccagggcatagcgcaactggaagatatccagtggcgtggcctgcgcagcgaagggccaggcaaaccccggcgcctcctcggcggtctgcacgaacacgcccttgcccggctgcacactgaccacacccaacgcgctgagggatgacaacgcctcgcgcaacgacgcccggctcacccccaactgcaccgccagatcccgttgcgacggcaacgcatcgcccggtccgaagccttgctccttgatcagtttgcgaatggcctgcagggccgcttccggtacggcttgggcgatggaattcataaaaaactcaaggttccagtcaactgagtggctagttgtaaagctattcgtggcgggcggcaagccacgccccaaaggggctcgcgaggttttgccgacgctcgaaaacagtgcgcaaagcccctgcactgttcagaccagtccgaccaccaaaactcaataaatactggccctgcagacgattcagaaggtgatggcatgcgctgtgcactgggcaaatccagaaaatcccttcgcccttctcggagagttgccatgaccaagcgctacagcgccctgcttactgccctgtttgccagcctgatgctgagccaggcacccgcccaggccaatggtctggacgacatcgtcgcccgtggcaccctcaaggtcgccgtaccccaggacttcccgcccttcggctcggtcggccccgacatgaagccacgcggcctggacatcgacaccgccaagctgctggccgaccagctcaaggtcaagctggaactgaccccggtcaacagcaccaaccgtatcccgttcctcaccaccggcaaagtcgacctggtgatctccagcctgggcaagaaccctgagcgggaaaaagtcatcgacttctccaaggcctacgcaccgttctacctggccgtgttcggcccgcctgacgccgccatcagcagcaccgacgacctcaagggcaaaaccatcagcgtgacccgtggcgccatcgaagatatcgaactgaccgccgtcgcccccaaggaagccacgatcaagcgcttcgaagacaacaactcgaccatcgccgcctacctggccggccaggtcgacctgattgccagcggcaacgtggtaatggtggcgatcagcgaacgcaaccccaaacgcgtacccgcgctgaaggtgaagctcaaggactcgccggtgtacgtaggcgtgaacaagaacgagccggccctgctggagaaggtcaaccagatcctgatcgcggccaaggccgatggcagcctggaaaagaacgctatgcaatggctgaaagagccactgcccgccgatctctgaaagcggagctgacccatggcgtatcaatttgactttgtgccggtgctggccaacaccgacctgctgctgcgcggcgcgctgttcaccctcgagctcacggccatcggcgccatcctcggcgtggccctgggcaccgtcggcgctgtggtgcgggcgtggaagatccagccgttcgcctggttcttcggcgtttatgtcgagttgatccgcaacacgccgttcctggtgcagttgttcttcatcttcttcggcctgccgtccctggggctgaagatcaccgagtggcaagccgccgtgctggcgatggtgatcaacctgggcgcgtactccacggaaatcatccgcgccggtatccaggccattccgcgcgggcaactggaagccgctgccgcgctggcgatgacgcgcttcgaagccttccgccacgtggtactgctgccggcgctgggcaaggtgtggccggccctgagcagccagatcatcatcgtgatgctcggctcggcggtgtgctcgcagatcgcgactgaggagctgagctttgccgccaactttatccagtcgcgcaacttccgtgcgttcgaaacctatgccctgaccaccctggtgtacctgtgcatggcgctgatgattcgccagttgctcaactggatcggccgccgcttcgtaatgaggaacagtcgatgagtgatttctcgttctgggacatcgtgcgcaacctggccaccggcctgcaatggacgttgctgctgtcactggtggcgtttgtcggcggcggcgtgatcggcttgctggtgatgacgatgcgcatcagccgcaacgccttcccgcgcaatgtcgcacgcacctatattgagctgttccagggcacgccgctgttgatgcagctgttcctggtgttcttcggcattgccctgctcggtgtggatatctcgccctggctggcggcggcgattgccctgaccctgtttaccagcgcctacctcgccgaaatctggcgtggctgtgtcgactccatcgcccacgggcaatgggaagcgtcggccagcctggcactcaacccgctggagcaactgcgctacgtgatcctgccccaggcactgcgcattgcggtggcaccgacggtgggcttctcggtgcaggtggtcaaaggcaccgccgtgacctcgatcatcggcttcaccgaactgaccaagaccggcggcatgctcgccaacgccacgttcgaacccttcatggtctacggcctggtggcccttggttacttcttgctctgctaccccctgtccctcagtgcccgctacctggaaaggagactgcatgcctctgcttagaatttccgccctgcataagtattacggcgatcaccatgtgctcaagggcatcgacctgaccgtggatgaaggccaggtggtggcgatcatcggccgcagcggctcgggcaaatccacgttgctgcgcacgctcaacggcctggaatccatcaacgacggcgtgatcgaggtcgatggcgaatacctcgacgccgcccgtgcggacctgcgcagcctgcggcagaaagtcggcatggtgttccagcagttcaacctgttcccgcacctgacggtcggcgagaacgtcatgctcgcgccacaagtggtgcagaaagtacccaaggccaaggcagcccaactggccaaacagatgctggaacgcgtcgggcttggcgagaagttcgacgccttccccgatcgcctgtccggcgggcaacaacagcgtgtggcgattgcccgcgccctggcaatgtcgcccaaggtgctgctgtgcgatgaaatcacttcagcgctggacccggaactggtcaatgaagtgctcagcgtggtgcgccaattggccaaggacggcatgaccctgatcatggtgactcacgagatgcgcttcgcccgggaagtcggcgacaagctggtgttcatgcaccagggcaaggtgcatgaagtgggcgacccgaaggtgctgttcgccaacccgcaaaccgccgagctggccaacttcatcggttctacggaacagccgaactgaccagctcgaattgaccacgcccctccagcagcatctcccgacgtactgagagggcatcggccggcaattgaaccgctatctccaccagggccgtcagccgacggcccgtcaccggcgcatcgcctgctgtcgcatacaacgcccgccccggtaacagctgcccaccagaggcttcatcgggctgccacgacaccggcctgccgtcgacctgagcctgcctcaggttcaaggtgaaacgcccttgccgcccgaattgaaagccttgtgcatcggcggcgacaccgctgaaacgcagcgccattgccgcaggatccgcgcaaagcacgctcaggtgcagcgtacgcggcgtgtcgagcgtcattgtcgccctgccggaggacgcttgcgaagggcgaatcaccccgtagtcgacccggtgctcgctcaaggtcatccggcagttttcagcctgcgcctggctcgccacaagggccacccacaacagccacagacttcggcgtttagcgagcatggcagaccaccggcgcggtttcatagaattggtcatcgtcaggctcttgctccggattgacttgcagcagacaggattgcgaattcggtaatgaaaccttcaaggttttcagcccatcgatgttgctgaggaaaatcatgccctcacccaccacactggtcacaaaactgttgtcctgcccgaacaccgccgccccttgaggcaagggccgaccctgttcgtcctgggcttcgagcaatagacgacgcactttcaccacatcaaagttgagaatattgactgacccacgaccggcagcgagcactttggtcccgttcttcaagtcgacgcgtttgggcagcgactgggtctgaacctgcagatggttgttgctgtaggcctgcagaccggggatcactgcctgaccgctgaaatcggtccataccggcccttggggcgtcgagaccttggccgctccgatatctcccaccgacacaatgccaaaggtgtcctgcacggcatacggcgagaaggtcacgccgtgctcatgggccacgatgccgccttgcagttggccggaatagttggtgttcgacgggtcacggctgacgcccaggctcacgcgggtatacagcggcaagacatccacacgaccacgcacgctttgctcccgttctttcacgtcccgatcaacaccgacttcatagttcacatagtcgttgacccgctcactgagcgcggtaccggcatccagccggtcacctcgacgactgacgtaagtgctcatgcgccgatcattgccgaggggcatcgtgacctgcagcctgacagacgtaccctcgtccagccgctcgtcgcggcggccacctcgaattgggtccgggcgccgaggggcggtcgcaccgacctgagcgtcggcgatgagtgcgacacccacgccattgaaggtgtcgttccatgaggcaaagaggtgatcgttggattgcccgtcaaactgcgagttacgggtgaaaccgagggagaaaccacccagggacggcgccgcccagctcaaacctgccgtgtactggcgtttgaaacgcgcatcgaggttatacccccgcgacgcctgaccggcgtccagtacctcccggtagccgcggctctgcgtcgaggcgctcaggttgatatcaaggttggcgaataatggagtccccaaagacagcgtgctacgtgcaccgcccacctcatcttgagcatcacgggacacgttatggcgcacgcccacggtcacccgatggaaaaacacactgctcagggccccccctgccgactggtactcatcggtacccagcaaaccgaaacccagcgacgaatgcggactaagcccccaagtgccgctgcccatggcgaccacgggcgactcccgactttcggtagacgtttcacgcaccttaccgagggaaaagtagtagcccggcgcaaccggaaccccaccacgaaaggaagcagcaggcaccacgaaactgcgctttgccccacgcacgtcgatcacgctcacatcgaggtcgctggtactgttcagcaacggtaaaccggtcagcctgaacgggccttccggcaccagggtggagtgaatcaatgcgcccgactgacggacttcgacccgcgactgactttgcgccagcccttcgactaccacgttgctgtcgcccgcgccggtacgctgctggccatccggggagaactgcaagccggtcagctgtaccccgccaaagatcgggttgttgctggaaatctgtcccacctggaaggtcgactgcaacgccgcgatgtcacgctgggcataggcattcacgtgttcggtgcgcgtcttgccattgtcggaaacataaaactggcgactgcgaacaatccagttccccaggttgaatcccgcctccgtataggccgatacgaagcgacttggcccactgcgcgagtgggtatcgaaacccaatacgtcgtagttgaagatggcggccgcgccaccctcggaaaaattaccgccctcccattccggtgctcgcagggactgggtcggcaccaccagggtgacctcatcgctgctggggcgcagccgcaccatggtcgctgggtattctccaacaaaatcatggcatgcctgatcgggagtaacgccctcgctcagaagcctggacggggtgatcagaccggcctttgccagtaacgccggggtgaagcacaactgaccctggtaatcgaaacgggcgtcaaccaatcccagcggcgtgccattgactcgcagtccgactatatggacaccttcgcgaaagcgcgctgcgctgcgaaagtattcagacacctgtggatcaatcccgagggagttcaatgcgaccaggtcaaagccttcccccagcccaaccgctgcgctcgtgcctggcagactccacagcgtcgcgagccccaataaaaacctggagcgcgcctgggcggaaccactgcacggtacccgtttggcggggcgacctgattgccggatctttttcataggcccgtcaatccgcttctgccgtgacgggcgtgcggtaactgtccaccgtaaacccatacaccgtggccgggtgaatctccaccgccaccactcccgccaccgagcctgccgacgcgagcgtcagcacttcgcccggcaggatgtaggttcgcggcaacgttgctacgcttgcctgcggatgcagctgtacttccatccccaggcggacgacgtaagcgctgttgttgtggaccctcaactgatcccctttacgttcccatgtcagcaactgccagggcgcgtcatgcctgggtaagcctttggggtgcaggatcaatggcaggctctggcgcaaggtgataccaatggtcgcagcgccgggcgcacgtgcctcagggataccttcaaaggaaacgcgtttcaggcgctgggtcttgagcggctgcttggcggtactgatgaagcgaacaagttgtgtctcgcccgcttcaacccgagtaatcgggggcgtcacgatcaacaagtgttcgaggtcttcgggtatgttttgtatgactgaatgaagcaaggcagggccaggatccgtgtttttaatattaagcgttgcctcgccttcttcttcattcagaataacaacggttgtttcgggctgcatgccgtcggctacggccatgccgcacaaaaaaagggacacgcttatatatcgcaacagcgacataacggttattgataaaacattcaccgattttccccacagccaaaaagtcgaacatcaacaattgcacacattaaaactgccgacatttagcggagacacgaaagtatcttcagcttaatgtcggctgttaaaggcgtagttagatgtaatccactgacagactggtgcgaccgtccagcgttacatcgcgggtcaggtccaaatcgttcgtgcggttgataacggctttcacttcaagcatgccagtcagactggtgatgaatgcaggcaccgcagtggtaccactacgccacgaatactgggcaggcgattgggcgaccttgccgtcactgcttccccacgccgccccctgactgctgcgcatgatggggttcagggccccgctggacgattgcaggtttttgagagtaacggagtacccaccggtacgcttgccattggcgatacccaggccgtagttttgagcctcggtgaacccagcaccgaggatgcctggcaccttgctcgcggattgcaggtcactcagcgctactcgaaactgcgcgggcgtttggccgcaactgatgttcaagttgaccgtttttggtgcaagagaagtgaactgcgtcggggacaggcttgcggctggaattgtctggtaatcgacgatgccgccgccggtgaggctaaggttgcaggccaccggtttgatagtccctcgtacaatcagttcagccacattcgttgcatgagccccgatactcgcggccaggcaaagaacacccactgtcataccaagcatttttttcatagttaacctgtcatctgtaatcagcaggtgaatttacgatgataagaattctgaccatacataaataacaccacggcgaaattgccggatgacagtctgtcgttttggcgcccgattaaagaatcagatggggcgccagttgttgtgggaaccgtaaaaacaaacagtgagccatatcaaaacaccgagtaggcacaaatacataaccaataaattattaaccgcccccttgtaggcaaaatcataaacagcatgatgacaataaaaagttaaagactcctacaaagataaaaccgctttcgttgagagccctgaaaaccgccttacatttcccacaagaattcctcacagacacccgcaggaaaattaccggcgcactacgcgttggctccagcggtcgatcgtggcacgatggtcaggttatcgaccgagaccccaaaccatgccgcaatcccaagccaagaatctgtccctgatcgccgccatcgacctgggctccaacagctttcacatggtcgtggccaaggcccagaacggcgaaatccgcatccttgagcggctcggagagaaagtgcaactggctgccgggatcgacgacgagcgccagctcaatgaagaatccatgcaacgcgggctcgattgcctgaagcggtttgcgcaactgatcaacggcatgccgctgggcgccgttcgaatcgtcggcaccaacgcgttgcgtgaagcgcgcaaccgtggcgaattcatccgccgcgccgaggagatcctcgggcacccggtagaagtcatctccggccgtgaagaagcccgtcttatctatctgggcgtgtcccacaccctggccgacaccccgggcaaacgcctggtcgccgacattggcgggggcagtaccgaattcatcattgggcaaagattcgagccattgttgcgcgaaagcctgcagatgggctgcgtcagcttcacccagcgctacttcaaagacggcaagatcaccccggcgcgctacgcccaggcctacacggcggcgcggctggaaatcatgagcatcgagcacgccctgcatcgcctgacctgggatgaagccatcggctcgtccggcaccatccgcgccatcggcctggcgctgaaagccggcggccatggcaccggcgaggtcaacgccgaaggcctggcatggctcaagcgcaagctgttcaagctgggggatgccgagaaaatcgacttcgacggtatcaagcctgatcgtcgcgcgatcttcccggccggtctggcgattctcgaagcgatcttcgatgctcttgaactgcaacgcatggaccactgcgacggcgccctgcgtgaaggcgtgctctacgacctgctgggtcgccatcaccacgaagacgtgcgtgagcgcacgctcacttcgttgatggagcgttaccacgtcgacctggaacaagccgcccgcgtcgagcgtaaagccctgcacgccttcgaccaggtggccgaagactgggacctggaagacggcgtctggcgcgaactgctgggctgggccgcgaaggtgcatgaagtgggcctggacatcgcccactaccattaccacaagcacggcgcctacctgatcgagcactcggacctggccggtttctcccgtgaagaccagcaaatgctcgccctgctggtgcgcggccatcgccgtaacatccccaaggacaaatttgctgaattcggcgacgaaggcatcaagctgatccgcctgtgcgtgctgctgcgctttgcgatcctgttccaccacatccgtggcacccaggaaatgccccaggtgacgctgcgtgccgacggcgacagcctggacgtggtgttcccgaaaggctggctggatgagaaccaactgacccaggcggattttggccaggaagcggagtggttgacgcgagtggggttcagcctgaacctgcgttgacctgacctgaagaacgctgcaaaacaaatgtgggagggggcttgcccccgatggcggtggaccagtcaatgaatctgttgactgacactccgtcatcgggggcaagccccctcccacattttcagaccgcgtcggtttttaattcaccgacagaatcgggctacccaacttctccaacaacgtcgcctgcgcactgcgcgggttctggttgccggtcggcgtgttgcgcacgtagcgaccgtccgactgcaggctccagctgtgggtgttgtcggtgaggtagctttccagctccttcttgacccgcatgatcaacttcttgccttcgaccgggaagcaggtctctacacgcttatcgaggttgcgctccatccagtcggcgctggagaggaacatctgctcttcgccgccgttgaggaagtagaacacccgcgtgtgctccaagaagcggccgatgatcgagcgcacatgaatgttgtgcgaaaccccgacaatgccagggcgcaggcagcacatgccgcgcaccactaggtcaatgcgtacgccggactggctggccttgtacagcgcgcggatgatcttcggatcggtcagcgagttgaacttggcgatgatgtgcgccggcttgccgtcgagggcgaactgggtttcgcgggcaatcatgtcgagcatgcccttcttgagcgtgaacggcgcgtgcagcagcttcttcatgcgcaaggtcttgcccatgccgatcaactggctgaacaatttgccgacgtcttcacacaaggcgtcgtcggaggtcagcaagctgtagtcggtgtagagcttggcgttgccagcgtggtagttgccggtgcccaagtgggcgtaacgcacgatctcaccggcttcacggcgcaggatcagcatcatcttggcgtgggtcttgaagccgaccacgccgtagatcaccaccgcaccggctgcttgcaggcggctggccagttgcaggttggactcttcgtcgaaccgcgcacgcaactcgatcaccgcggtgacttccttgccgttacgcgcggcgtcaaccaaggcatcgacgatttccgagttggcaccggaacggtacagggtctggcgtacagccaacacatgcgggtccttggcggcctggcgcagcaggtcgaccacgggcgtgaaggactcgaacgggtgcagcagcaggatgtcctgcttgctcaccacgctgaagatgttctcgctgttttgcagcagtttcgggatctgcggggtgaacggcgtgtattgcagctccggatggctgtccaggccggtgatgctgaacaggcgcgtcaggttcaccgggccattgacttgatacagctcggtctcgcccaggttgaactgcttgagcaggtagtccgacagatgtttcgggcaggtgtcggccacctcaaggcgcaccgcatcgccgtagcgtcgcgagaacagctcgccgcgcagggcacgggccaagtcttcgacatcttcggagtccagcgccaggtcggcgttacgggtcaggcggaactggtagcagccttttaccttcatgccctggaacaggtcatcggcatgggcatggatcatcgacgacaggaatacatagttatcaccagcgccccccacctcttccggtaccttgatgatccgtggcaacagacgcggcgccgggatgatcgcaaggcccgagtcgcggccaaaggcgtcgataccttccagctccacgatgaagttgaggctcttgttcaccagcaacggaaacgggtgcgtcgggtccaggccgatcggtgtgatgatcggcgcgatctcgtcgcggaagtaacgacgcacccaggtcttgatcttggtggtccagtgacggcggcggatgaagcggacctgatgtttttccagctccggcagcaggatgtcgttgaggatcgcatactggcggtccacatggccgtgcaccagctcgctgatgcgcgccagtgcctggtgcggctgcaggccgtcggcgccggcctgttcacgggcgaaggtgatctgcttcttgaggccggcaacacggatctcgaagaactcatccaggttgctggagaagatcaacaggaacttgagccgctccagcagcgggtaggactcatccagcgcctgttccagcacgcgaatgttgaattgcagttgtgacagctcgcggtggatgtacaggctgctgtcatccaggttggtcaccgccgctaccggggccggcacgggcggttcggccaccacgacgggcgcggcgggctcatgctccggcggggtctcggtgacttgttcaaccaccgggtgagcgtcttttacggcaacttctgtgagtccttcggtattcatcgagtgttcctgtgagggctattgttgctctctaagcaattgggcggcgcgggcggcgaagtaggtcaggatgccatcagccccggcgcgtttaaaggctgtcagggattcaaggatcaccccttcactcagccatccattctgtattgcagccatgtgcatcgcgtattcgccactgacctgataaacaaaggtcggcaccttgaattcgtctttgacccgataaaggatgtccaggtacggcatccccggtttgaccatcaccatatcagcgccttcggccaggtcggccgccacttcgtgcagggcttcatggctgttggccgggtccatctggtacgaggccttgttggccttgcccaggttcagcgccgagcccaccgcatcgcggaacgggccgtaataggcgctggcgtatttggccgagtaggccatgatccttacgttgacgtggccggccagctccagggcttcgcgaatcgcctggatgcggccgtccatcatgtctgacggggcaaccacctgggcgccggctgccgcatgggacaaggcttgcttgaccagcgcatcgacggtgatgtcgttttgaacatagccgtcttcgtcaagaatgccatcctgcccgtgggtggtgaacgggtccaacgccacgtcggtgatcaccccaagctgcggaaaacgctcgcgcagggcacgggtagcacgctgggcgatcccgtccgggttccaggcttcggcagcatccagcgacttgagttcagacggcgtgaccgggaacagcgccaaggccggaatccccaattcaacccaacccgcggcctcttcaagcagcagatcaatgctcaaacgctccacgcccggcatcgaagccaccgcttcccgacggttttccccgtccagcacaaacaccggcaggatcagatcgtcggtcgtcagcacgttttcacgcaccagacggcgagaaaaatcatcacgacgattgcgacgcagacgggtggcggggaacaggcgattggcaggggtaaagctcacgacagactcctgagcccgggtttacgggcgagcgttgcagttataagcggccattatgacgaaggtatgacagttgtgcttaaggatgcgacctgtagtcgcattcggcatttctgtaggaattgttcacttcgtgacacatctcgatactttcatgaatcttcatgaaggcgtaggctgcgcgttcatttcgccagcaccccagaccatgcttcaacaattcctgcatgacttcggctactttgcgctcttcctgggcaccttctttgaaggcgagaccattctggttctcgcgggcttcctggcgttccgtggatacatggatatcaacctggtggtggtcgttgcctttttcggcagctacgccggcgatcagctttggtattacatgggccgcagacacggccgcaagctgttggcgcgcaagccacgctggcaattgatgggcgacaaggccctggagcacatccgcaagcacccggatatctgggtactgagctttcgcttcgtatacgggttgcgcaccgtcatgcccgtggcgatcggcctgtccggctacccgccgttgcgctacctgatcctcaacggcattggcgctgcgatctgggctttggctttgggcgctgcggcctatcacttcggcgcggtgctggaaggtatgttgggcagcatcaagaaatacgagctgtgggtattgggtgccttactgatactgggcttcggcctgtggctgcgccgccgcatcaagaatgcgcgcattgcccgtgaagcctgtgccgacgccaaggcccggctcgcggcagagccggtcccggtcgagccgcctaagacgccagtcgagtaagccggcttctgcagcagtagaggccaatcacactcagcaagctatagctcagcaggcccagccagcccaggttgctggccggccataacccgaccaacggtgccagccacaccagcggcacattcagcaccagccgcgaaagctcggccttccacgcccacggccggttctccagcgccactcctaaggtaaacaggcccagtgccatggcactccaacccaggatcagtgccgccgtgggcataccctcgccaaaattcatcagatagctgccaaagcccacatacgccgcaaattgcagggcgatatagacctgttgacgcacatccagcgacacgtcgaatttacggaactggctcaggtcatgcttgaccatcgggtacttggccttcacgtccgccgggcgccagccggtgcgcatgaaccagatgcgcagcttgtcccaccagcgctcggtgcgccgcgcatcactccacaactgggcatagaactgcaggttggcccacagcgggttccaactggccaacggtgtggtcacgccgaaaatcaccggttcgttgtcgtcttcctcctggaaggtgccgaacagccggtcccaaataatgaacacaccgccgtagttacgatccatgtagagagcgttctgcgcatggtgagcccgatgattggatggcgtgacaaaaaaccactcgtaccagccgagcttcggcacgtgccgggtgtgcacccagaattgatagagcaaattaagcgatgccacgctgataaataccaccaatggcacgccgagtacggccaggggcaggtagaaaatccagctcagcaggaagccggtactggtttggcgcaaggctgtgctgaggttgtagtcctcactctggtgatgcaccgagtgcgcggcccacaggatgttgcgttcatggcccatgcgatgcagccagtaatagcagaagtcgtagaacacgaaagcgaacacccaggtccagacgctctgggcaggcagttcgatgacggcgagatgcttgagggcgaacgcgtaggtcaaaatccccacgcctttggtcagcagccccgtggtggtggacagcaccccggtgctgaggctgttgatagcatccgccacccggtagttgcgctggccgcgccagcgatcggcgagcagctctaccacgatcaaggcgatgaaaaacggtaccgcgtaaggcacgaagtccatggtctggtccggtctatttttgttacatcaagattaggtgcagcggcgtgagatcccattggcaacagatgacaaattagtagacatttaacgccaagaccccaggagaaatgcccatgagcaaaaagattgcagtgatcctttccggctgcggcgtgtacgacggcgcagagatccacgaaagcgtgatcaccctgctgcgcctggaccagcgtggcgctcaggtccaatgctttgccccggatattgcgcaactgcatgtgatcaaccacctcaccggcgaagagatgcccgagtctcgcaacgtgctggtggagtcggcgcggatcgcccggggtgacgtgaaagatatccgcgaagccaacgccggcgacttcgatgcgctgatcgtgcccggtgggtttggcgcggcgaaaaacctctcgaactttgccgtggagggtgctggctgcagcgtcaacccgcaggtgctggaactggccgaagcctttgccgaagcgggcaagccggtggggctgatctgcatctcaccggccctggcggctaagatctacggccccggcgtgacctgcaccatcggcaactgcgccgacaccgctgccgcactggacaagatgggcgctacgcaccaggaatgcggggtggaagatatcgtcgaagacaaggcgcgcaaactggtgagcaccccggcctatatgctcggcaagaacatcagcgaagtcgcttcggggatcaacaaactggtggatcgggtgctggaactgactcacgagaacgactgatagcccccaactgtggcaaatcgccagttgtggtgagcgggcttgttgtggtgagcgggcttgccccgcgnnnnnnnnnnnnnnnnnnnnnnnnnnnnnnnnnnnnnnnnnnnnnnnnnnnnnnnnnnnnnnnnnnnnnnnnnnnnnnnnnnnnnncgcggggcaagcccgctcaccacaacaagcccgctcgccacaagaaaccggatcaccatagggtcaagccggacgcatcaactttgtgagaatgcggtccagcgcattggcaaacgcctgcttttccttctccccatggggcggtggcccgccgcccatctggccttgctcacgcagatcagtgaacagattgcgcacggccaaccgttcactcatgttcgccgggctgaactccttgccgcggggatcaagcgccgtgacgcccttcttcaccaggcggtcggccagcggcacatcgctgcagatcaccagctccccgggcaccgcgtgctccaccaggtagtcatccgccgcatccgggccgctgggcaccacaatcagcttcacacacgagaagctcggcttgatctgactctgaccggccaccagcaccacctcgaactggcgcttgagggcgaacctcaccacctggtccttggctgccctaggacaggcgtcggcatcgatccacacccgcatgctcaggcaaccacccggcgcttttcggccaggcggctgcggccatacagcaccacaatcgccaggatcgccaccgcctgtgcactcaacgagtacgcatcggcgtggatacccagccagtcaaagtcaaagaacgccaccggccgggtgccgaagatgccggcttcctgcagcgccttcacgccatgcccggcaaacaccaccgacagcgcacacagcaacgccgcgttgatgccgaagaacaacgccagcggcagcttcgccgaaccccgcagaatcacccacgccaggcccaccaacagcaccagcgctgtggcgccccccgccagcaccgcgttgtgcccggccgggccggcttgcagccacagggtttcgtagaacaggatcacttcgaacagctcgcggtacaccgagaagaacgccagcaccgcaaaaccgaagcgcccaccgccgcctaccaggctgctcttgatgtagtcctgccaggcggcggcgtggcggcggtcatgcatccacacgccgagccacagcaccatcacactggcaaacagcgctgtgcagccttcaagcaattcacgctgggcgccgctcacgtcgatcacatacgcggccaatgcccaggtcgccaggcccgccagcagcgccagaccccagccgacgttgacgctacgcaccgccgattgctggccggtattgcgcaggaacgcaaggatcgctgccagcaccaggatcgcttccagaccttcacgcagcaggatcagcaacccggagatgtagctcaacgaccagctcaagccatcaccgccgagcaggccggcggattcagtgagcttgcccttggcgacgtccaggcgttgctgcacctgttcaaccggcaaaccgtcctgcaacgactgccggtaggccatcaacgccttctcggtgtccttgcgcacgttggcgtcgacgttatccagcgagctttctaccagctcgaaaccttccaggtacgcagccacggacaggtcgtaggcctgctcatgatcacccttctggaacgccgccaggctcttgtccagggtggcagcggtgtagtcgagcaactgcgccgggccacgcttgacctgcggcggttgcgcacgctgggcgcggaacgtcgcggcggcggctgggccgttggcagccagcacttcattgggggtctggcgggccaggtcggcaaggttgaacggttgctcgctttttgcagccaccgggtcggcagtaaagccggcgatgtaggtggccaggtcccagcgctggcggtcgtccaactggtcggcgaaagacggcatgtcggtgccttcaacaccgaggcccagggtgttgtagatcgcgtagaggctcaggcgatccaggcgcacggcgtcacgcagattggccggtggtggcgtcatgcccacgctggccgggccgtcacccgcgccagcggtgccgtggcacaccgagcaatgctgggcatagagcggcgcgcctcgcgttggatcaggggtgatcgccggggcctgactgacttcataggccacggctagttgggcacctaactgacgggcttggcgggcgactgtcgtaccgtcctgatgggcggttacggctgctaacaattcgtcgacgcctttgaccagcgccacgcgttccgggcgctgcggcagctctgccaccagcccctgcaataccccgagaaactccagctgttcgcggtattcggattcatcgataaccttgcccgcctccaccgtcgctgggtagtcagcgccaatgtaatccagcaaatgcagggcttggggcgcgccctcggccgtcgcggccaacaggttgacgctgcacgacatcaacgccggcaatatcagccaggcgagaaaacgaaggggggcaatcatgaacgaatctcaaagggaaatacgaagtaacacattgttaagccttaaagggtttgactcaaggcgtaagtgatttgtcgttgtttgaggcgaggcattttcaggagcggactagtggcgcttttgtcgacttagtcgggcaaaaagccattgttttgccagcaatgacgcttataatgccgcgccctgttagtgcgaaagggaatttcattcctgttttttataaggaatgaccacatcagttgatactttcagggaagaagtctgcatggcatttcgcgccttaccttcgctcgcgctcgtggcggtgaccttgctgtccggttgttcgatgttccgcagctacgacacggaactgcaagccaccaaccagcaactggccaccggcaatgtcgatgcagccctgacactgctggaaaagaacaacaccggcgacgacaaggacttgctctatttcttcgagaagggcgagttgctgcgtgccaagggtgatttgaccggcagccagaccgcctggcgcagcgccgacctgcaagtctacaagtgggaagagtcggtcaagttcgacagcgcaaaatacctcgcccagttcggcagtttcctggccaacgacaaggtgcgtcgctacgaaggctatgactacgaaaaggtcatgctgaccacccagatggcgctgaacctgctggccctgaacgacttcgacggtgcgcgcaccgaaatcaagaagacccacgaacgcgaagcggtgatcgccgacctgcgcgacaaggaatacctcaagcgtgaggacgaagcccagcgcgaaggcgtaaccacccagatgaaagacctgcgcggctacccagtagaagccctcgacgcaccggaagtggtcggcctgaaaaacagctaccagagtgcgttcagccattacctggcgggcttcgtctatgaagcactgggcgaaaaagacctggccgcgcccggctatcgcaaggctgccgaattacgccccaataccccgctgctggaacaggccctgctggacctggacaaatccagggtcggcgccgatgaaaccgacgtgctgatcgtggtgcaaagcggcctggcaccggcccgcgactcgattcgtctgccgctgccgatcccgatcaatggcaacctggtgatcaccccgctgtcgttcccggtgatcaaggcagatacatccaccgccacgtttgcccagatcggcgtcgacggccagcaacagaacctcaccgcactcaacagcaccacggccatgtctcgccgcgccctgcgcgatgacatgccagggatcatcctgcgcaccaccgtgcgggcggtcacccgtggcgtggcgcagaacaacctgaacaagaccaacccgatggccggcctggtgctgggtattgcttcggccgtcaccgaaggtgccgacacccgcacctggcgcaccctgccggacatgacccaggtgacccgcctgcgcctcaagcacggcgagcaccaggtcagcctgcccaacgccctgggtggcacgctggtgacggtcaaggccgaccagcgctatcaggtgatcaccctgcgcgtggtcggcaaccaggtattcgccggtggcctggccgcccatgtggtgccgagcaccgccgcccaggccatcgccctcaaacaaccttaaggagcacgctatgcgtcatttcatcctcggcgccctggcgctagtcctgctggccggctgcgccaccccgccaccgccggaacccggcagcgccgcgagcaaaatcgtggtgatgggcaagttcaagggcatcgccgtcggcgccatccgtgtggcccgcgagaacggcttcctgaccgccaaggtgcagttgagcaacatcaccagcagcaaccagatgatgtactaccgctttgcctggctgggtgccgatggcttcccggtgggcgatgaagaaacctggaaagtgctgaacctgtacgccaaccaggcgaccttcctgccggcgattgccaatttgccgcaggcggcggacttccgtcttgaagtgaaaaccccttgagccgtccttctttgctgctgagagatttccccatgtttgcacgcttctcgatccttgccgtcgtcgccatcctggccagcggttgctccaacacttcgccggtactgggcggtaagaacatcagctacggcgataccaaggccgtggaactggtgaccaacgagttcggctccaccgacctgcagatgatcgccgaaagcatgacccgctccctggcccagtccggcatcctgcaaggccgcccggtggtgcaggtgtatgacgtgaagaacaagaccagcgagtacatcgatacccgcgagatcaccacgtcgatcaagacccagctgatgaagaccggcaccgcacgcttcgccagcgacaacaccgacatgcagagccaggtcgaccagctcaagctgcagaaccagagcggcctgtacaagaagtccaccgtcagcaagaccggcaacatggtcgccgccaagtaccgcctggaaggctccatcagctccatcgtcaagcgcagctcggactacaaggacgtgttctacaaattcagcctgcaactgatcgacgtcgagagcggcctggccgaatggatggacgaaaaagaaatccgcaagaccacggagcgctaagcaatgcgtgcatggatcggcatgatcggcctgctgtgcgccttcggcgcctcggccgccccgaagatcgcggtgactgacctggcctacgaggcgcgggtcgaggaatacattcaccaggtgtcggcaagcaacaacttccaggccagcgcctaccacgccagcggtacgtcgaactacagcgagtacgaaagccgcaccagctacatcgaacagaccgagctgcgtaaattcagcggggatatcaagggcgagatcctcaagtcccaccagttccagctggtacagggcacgccctacaccgccgatgccaagggtgacgtctacgacgtgatcaagcgcatcaaggccggccacttcaagggtgcggactatgtgctgtttggcacgctgtcggatatcgacttcacccaggacatcaacgccctggaccagaccaacagctactcggcggtgctgggcctgacgctggtggcggatttcagcctgatcaatacacgcacctacgagatcacctcggcgttcaccgccatgggtgaaggtcaggacaccaagttggtgaacaaccgcgatgtacgcgtcagcctgaaccggccgcgggtggtgaaggaagtgtcgaaagcgctgggtgaagatgtagcgcggcagttggcagagcaactgggtggtgggtatcaagacccgggcaagcctgcgttgcgcaataacctgccaagggatgaagcgccgaaaattttgcgctgacgccctattcacaaacaccgcaaaactattgtgggagggggcttgcccccgatagcggtgggtcaactacaagttagctgactgacacaccgccatcgggggcaagccccctcccccattttttaatccggttgtgtcagttatgccgtggcacggtgcaggctggcgaggaagcccgcagccccaacgaacaaccccgcaaacgtacgattcatccgcttctgctgcttaggcgtacgcaacagacgcaacaccttcgacgccagccccgtataccccgccatcaccaccatatcgacacagatcatcgtcgcacccaggatcaggtactggatcagcagcggcgcctgcgggttcacgaactgcggcagcaccgccagcatgaacaccagggccttggggttgctggcgttgaccaggaagccacggaacatcatcgccatcggcttgccgatcgggcgcacggccgcgtcatcggtcatgtccatgggcaaggcacgccattgcttgatggccaggtacaccaggtacgccacgccaaaccatttgatcgcatagaacgccgtggacgacgtcgccagaatggcacccaggccgcacgcgaccacggcaatctgcattgccaggcccagttgcaggccgatggcattccagtaaccgcgcaggaaaccgtattgcaggccgctggacatcgaggcgatggcgccagcgccaggggaaagggagatgatccaactggccaggaaaaaggccagccacgtatcgagtgccattacacacctcaggagggagtttgctgttgtgccttaagctaactccgccgaccaaaggatggctatagatttttacaggatgtgaatgctagcggtcgcccggaaagacatgggtacccggccaacggcgcaccgagcgctggaagaacaggctgttaggcacctgcaccatcgcgctgtcggtaccggcctcggccacttcgaccagcgtggtgtagagcaggttgatcgccacgacccggcccttcacgcccggtttgtcgacggtgtccaccagttcgacgatatcacccaggcggaacggcccgacggtgaagatcagaatggcgcagagcaggttggacaacaccgaccacatggcgaagaacgccaccgcggcgaccgcaacaaaccccgacagcgccgtccacaacaccgtggcggacacgcccaggcgccccagcacaaagatcagcgcactgcccatgatcaaccagcgcaagccgccacgcagcggcatcagcagttgcggtgggaacgggtagcgctcgcccaggcgagtcaggcctttggcgacaaagcgctgggcgaggtagccggccagcaggatcagcaggatttgcacgccgacccatacgggttcgacccactgcgtcgggatcggcagttgcaacgcttccatcaggacagcgcctccagctgcgcttgcagggtttccagcagttcgagggcttccatccaggtttcctccaattgcccttcgcgtaccttgagcttggcctgctcagccagcaggtcgcgcaattcatccttgcgggccgcctcgtagacggcgctgtcgcccaggctggcttcgatcttggccaggcgctcgtgcaccttgcccagctcggcttccagcttgtcggcttcacgcttgtgcggcgccaactgctgacgcaatgcggcggcagcctggcgctgggctttcttgtcggtcttgtccgggttgaccggggtgttgctgaccggcgcgttgcgcaggcggtaatccgtcagccagcgcgcgtagtcatccaggtcgccgtcgaactcttcgactttaccgtcagccaccagcaggaagttatccgtggtgctcttgagcaaatggcgatcgtgagataccaccaataccgcaccactgaattcctgcaaggccatggtcaacgccagacgcatttccaggtcgaggtggttggtcggttcgtcgagcagcagcaggttcggacggtcccaggcgatcaacgccagggccaggcgggctttttcgccgccggagaagttcagcaccggctcgtcgatacgcgcgccacggaagtcgaaaccaccgaggaagtcgcgcagggtctgttcgcgctcggtcggcgccaggcgctgcaggtgcagcaacgggctggccttggagtccagcgagtccagctgatgctgggcgaagtaacccaccaccgtgttctcgccacgggtcaggcgcccagccagtggcgacagctcgcccgacaggttcttgatcagcgtcgacttgcccgcgccgttggggccgagcaagccgatacgtgcacccggcgttagctgcagcttcactttttccaggatggtcttgtcgccatagcccaggcgcgcatcggaaagatccagcaacgggctggagatcttcaccgactcacggaacacgaaatcgaacggtgagtcgacgtgggccgccgacagctcttccatgcgctcaagggccttgatccggctctgggcctggcgggccttggtggcctgggccttgaatcgggcgatgtagctttccatgtgcgcacgttgcgcctgctgcttctcgtaggcctgttgttgctgggccaggcgttcggcgcgggcgcgttcgaacgcggtgtagccgccacggtagagggtgattttcttctgttcgacgtgggcgatgttatcgaccacggcgtcgaggaaatcccggtcgtgggaaatcagcagcaaagtaccctgatagttcttgaggaagtcttccagccacaggatcgcatcgaggtccaagtggttggtcggttcgtcgagcagcaacaggtcagacgggcacatcaacgcttgagccaggttcaggcgcatgcgccagccgccggagaagtcggcgaccgggcggtccatctgttcgttggtaaagcccaggccggcgagcattttgcgcgcgcgggcgtcagccgtgtagccgtcggcgctgtcgagttccgagtgcaggcgcgcctgtgcggcgccgtcctgggctttctcggcctcggccaggtcgtgttgcacctgacgcaggcgcaggtcgccgtcgagcacgtagtcgatcgcgatgcggtccagggtgtcgatctcctggcgcatatgggcgatgcgccagtcggccggcagcaagcagtccccggaatccggggtcagctcacccagcaacagggcgaacaacgtggatttgccggcgccgttggcaccgatcaggccggctttgtgaccggcgtgcagggtcagctcggcgtcttcgagaagacgttgcgggccacgctgtaatgttaggctttgaagtcggatcataatggcggcggagtctaccagcttcgttggccgctggcttgggtgtgaatatgtgcgctgacctgtggagctttgccctttcgacttacgcccgctcagggtgcgaggccgcttgcctgcgcttgcaggagcaaggtgcggacgtgtgcctgctgctgtgtggtgcgtggctggagcagcgcgcggtgacagcgaccgctgaacgtatgcaggcactcaaacaaatcgccagaccctggcaggcacaggtgattgcaccgttacgacaggtgcgcatgcaatggcgcgccatggcgcagcaggatgaggatatggcggggttacgcgaacgggtcaaggccctggagctggacgccgaacggcagttgctggcacgcctggaagcgttggcacaaacgtggccgactggcgatgcgggggaccggctagggtggctggaaggactggcggctgaggatgccgccaaccttgaccacgacgcgctgcatcagctgcgcgtcgtggccaccagcacttaggaagcgctggttggagtggcgcttggcgctaccggggcaggcgtgctgctggccggagcagttggagcggtggatgcagccggggcggcagcaggagttgctggcttggcagcagccggtttggcggctggcttagcggctggtttcgcagcagcaggtttagccgctggcttggcggctggttttgcagcaacaggtttagccgctggcttggcggctggtttcgcagcagcaggtttagccgctggcttggcggctggtttcgcagcaacagttttagcaactggcttggcggctggctttgcagcagcggttttagcagctggcttggcggctggctttgcagcagcggttttagcagctggcttggcggctggtttcgcagcagcaggtttagccgctggcttggcggctggtttcgcagcagcggttttagcaactggcttggcagctggttttgcagcagcggttttagcagctggcttggcggctggttttgcagcagcggttttagcagctggcttggcggctggttttgcagcagcggttttagcagctggcttggcggctggttttgcagcagcggttttagcagctggcttggcggctggctttgcagcagcaggttttgctacggctttagcgggtgccttggcagcaacagctttgctcgccggcttcttcgccgcgctcgctgcaacagctttggctggggtgcgagcgcccaacaccttagccacggcttccttcacacgaccaacgccctgggccagtttcaggctttcctgagcatcttttttcagttgggaaatgtaggcgcgggtttcagcttggcgatccttgagggcgtccagcagatcctcaagttctttgacagcgtctttggctttggcttgtgccttggccttgccggcagtagcggcgtcttgcagtttggtgcgggatttgtgcagcttttcttgcgctttaccgcgttgtttttccagcttggcgagcagtttttctgcatctgccaacgcttgggaacaggcgctttccagatgttcgagcaagctgcccgagagttgttggagtaaatgcaacggggtattaacaggcttctgtttggccgacatggtttacctcctggctgacgtgggtgcggctcatactagccctctgctcttaccgccgctagggcatgttgacagtatcgtttgccttgcgttgcaccgtgagaaaattcttatcgatataacgaaaatacgcggcacttttgacgtcaccacactggcataatccgttgcactttcggcgggaggatgcccatgtcgcgttacctttttcttgtgctcggcctggcaatttcggtggccaatgcgagcgaacaatcgccggtaaaaaaccctgggcagaaccagcacgacctcgcctacagcctgggcgccagcctcggtgaacgcttgcgccaggaggttcccgacctgcagatccaggcgctgatcgacggcctcaagcaagcctatcaaggcaaacccctggcgctggacaacgcacgcatcgaacagattctggcccagcacgaagcacaaaacgaagctgatgcgcaggcacctcaaagcgaaaaagcgctcgcggccgaacaacaattcctgagcaaagaaaaagccgcaaaaggtgtgcgcgaattggcggatggcgtcctgctcaccgaactcaccccaggcactggcgacaagccgagggccagcgaccaggttcaagtgaagtacgtgggacggctacccgatgggacagtgttcgaccagagcgcgcaacctcaatggtttcgcctggacagtgtgatcagcggttggagcagcgcgttgcaacagatgccggtgggcgccaaatggcgcctggtgattccatcagcccaggcctatggcgccgacggtgccggcgaattgattccgccctatacacccctggtgttcgagatcgaattgctcggtacccgacactgaggcaataaaaaacggtgcgccatgcgcaccgtttttttgtaccgccgtcgtggatcaagcttgagtagcagactcttccttgtgggcgttgtgcagcacttcgatcaagcagtcttcgagttcgaatcgctcgtgaagcaacgcgcccaattctttgaatttatccgccacgcagttaccggcatcacacaggtcggtgaactccagcagcttctcggtgatgacatcgatacgcgggtagatggtctccgccaagtccaggccacgctgatcgtcgaaggcctccgcctccttggtcagttgctcgtagacaccgaaatggccggctgacacgtagtcaaccaacacaccacaaaagtcctgcaacggttcacggttctcggccagtgcttcaggcttggcgccaagagcatcaaaggcccgaaccagttcgtgacgtgccttcaaccagctgtcgatcagcttgtgcaccccaccccagcgttcctgagcattctgacaactttccagcatgatgatctctcttccctaataggggcgctgccgcctggtgcccgcgcaacacttcaaggataaagcagcagccggacaaggccgcatctgacaaacggtttcaacaacacgtgcgggccagattatgcccgcatgactatggcttcaaggtacgcaggagagaaagttcatacaagtgtttaatcccgccctacaaactgcgacccgatatcagcgcctcgccagacgcaaacgttggctcaaaaacagctgtgaaaattgcatgacgcccagtatcaacatcccaatgaagaacagcaggctccactccggcaggctcaagtcaaacagcgtccagttgatctcaacgcagtcgacggtgcctttgacagtcaattgcagagcctgccaaaacgacaggttttcgatcatgtaatgcaggctgggccagcaatcagccgactgtcccggtgcggcgttttgcagcagtacttggcgtatggcggtaatggcacccagcagtgcgaagcccatgctcgccagcccatacaggtagataaccaagcgcttggggtgatggagggcggcgaccagattgaccaatgtgaaaccggccaggaaaccccgttgcatctggcacagaaagcaaggacgcaacgagaccccgaactcgaggtaaaacgaggcgcccaatgtcagcgcacccgccaggaacgcaaggacatacaaggagcgtgaaggggccaaagacatgctttatccgcatcgcgaaagataggtcgctacggtagaggaaaggcctgaccgctttcaatacatgctggagcagacgattccgcgagagagtaaggagatcccgccagaagatggaagactttggacaacagagtgtcggactttgcccacaatcgcgctgatagccgctttctgaggtcctgagggattggctgccagaactatccgagccaaccctcgcctgtcttcctacctcaaacccgcgccgggacgggcagcggtgaagccagcaaacggttatccagcaaccccagcccttcctggaacaattggttactgcgctcggtgtcacccagttgggccaacaagcgcgccagctcggcgcaggcctcagggttgcgctgcacctgcaggctgctttccagataatcccgcgccttgccccacaaactgttttgcaggcacagacggcccaacgtcagcagcaggctggcatcgccaggatgatccttcagccaaccttcggcaaacttcagctgccgagccggatcgctgccacgcaacagaccgtacagccggatcaggtggctgtcgtaaccacgcttgatcgcgccacgcaatgcttcctcagccttggcgtcggcacccagttggcgcaattgctcggcgtaagccaggaccaattgcggctcctgacgctgtgcggaggtgagttgttgccaagcccgttcaagggactgcaagccggcctcgccctgttcttcgcgttgggctgcaaggctgaggttctcgccccacgcacgacgctcaagctcggccagttcactggcgggcaagactttatccttgcgcaattccggcaacaggcggatcaccgatgaccagtcgccccgctgctgatgcaagcgctgcaattggcgcagcacctgcgcattatggggatggcgctcgtgcatcgcttgcaaggtggtcagcgcaccctctgtatcaccacggtccagttgcagctgggcatggctcaaggcaaccgccagctcggcctggggctgacgctccagggcacgctccagcaaaccatcagactcttcgtagcgcccctgttcattggcagcacgggctgcgccgaggtagtacagcagcggctgacgctcggcttcggcagcgcggtgcaggtgacgctcggcgctggcccagcggccttcggcgaggtccatctggcctagttcgatggcgatctgcacgcggcggctgcggttgcgccgtgaccacgggttgaccacgccaccggaagtggtgaccaggctcagcagcacgcggatcagatagatcgtcaaacccatggcaaacaccgccaccacggtcgcccacaggctcgactcgtaatgcagcacgtgcggataggtgaccagcacgtagccagtgtgtttcgaaatgcccaccgccagcgccagcgcgatggcaatcgccagcaccaggatcacatagaaacgtttcatcggctctactcctgcttcgccggcgtcgccgccgccttggcttcgtcggcagacagatgacgccgctcaaggtacgcctgcacagccgccaggctcgcagccaggtccggcgtcactaccgacaccgccttgggctcaagctcggcgatacgtgccagcatcgccttgctctgcgggttgtcctggttgaagttgtcctgcaagacgctgcgcgcttcgcccaaggagcggctgtagaccgccgactcaccattgagcgcagcccattgtgcttgctccagggccaggctcagggccaggcgcacctggttcaagccttggccggccagcagcggacgaatgttgtcgtccgggttgaagtcgatgcggaagtagcgggaaatctgctcccaccattggctccagcggctttcggtgtccgaggtcgggcgtccttgggaagccggctcggtcaactgatattcaggggcgatggccgccaactgcacgacctggtcgcgcaaggccgccagttgcaggtacagcccggtgcggtccggctggtcggtgctgcgcagcgcggcaaggctcttagccaattgttcgcgggcagcgtaggagccagggtcgctttgttcgcgaagaatctcgtcggcaccctgcaccaatgcctgggcgctgttgatatcttgaagggcagaaaggcgcaggctcgccaggcgaatcaagtgttcggcctcggccaggcgccagtccttacggctggcgcccagcacggtttccaggcgctggctcaggcgttgctggtcgccctgcaactgggccaccaggcgacggcgctcctccagctcatccgcacctggcaactgcgccaggcgcgccgccagttgttgctggctttgcttgagggactgggactggtcatcgagggtctgcacctggcccaactgctgttggctgctggcctgcagggcgcggacctgccaaatcccccaaccgccggcggcaacaccggcggcgccgagcagcagggcgatgattgccaggccattgccacggcgcggcgcggtgaccggtgactcaaccggcgcatcaagcgcgggctgggcttcatctttaggcaaggctgtttcgctcacgtatccgtcctttgcgtttcagagagtgggaacggtatagctccgtatcgccactaacaaagccgcggcactcgcaccacgacaatccacaactttttctgcaccggcggcccgcgccatctcctggactcgcgggctcggcacgaacaacggtagctgtgccacttggggccaatcggctccggccagggcttgcaggtgtaaaaaaccctgcccactgctgaccaccaggccgttcaagcgttccaactggatgcgttgcatcagtaccccggcgtcgtaggccggcaggaaacggcgatacaactccaggtagtcgacactagcaccttgctcacgcaaacgctccgccagcagctcacgccccccctcgcctcgcaggatcaagacctgggcatcagggcgtgcgatagcctcgcgcaacgcaggcaattgaagcaaggcctcgctgtcgtcgccagtggggggatagtgaacgttgaggccgtgatcagccaatacctgcgcggtggcggcgccgacactgaaccatggcaactgcggccatgcgcgatccagctgcgcgaccgcaagtcgcgccgccggcttgcttactacgatcaccgcgcagtagcggctcaggtcatggaagacagcctgctgttcaggagtgacaggcagcggttcaatatccagcaacggcaagctgctgctgaaaacccccgcatcggacaacgtggccgccagggccatcgattcctcggcaggccgcgtcagcagcacacgccattcggtcactgcgggccggcctcgccgtagactttttgcagaatggcaccggcgcccttctccagcagcgcttcagccacctggataccgagggccgtggcatcccgttgcgggccacggacctcggcggccagcagggtgccgccttccggatcacccaccaggccacgcaaccacaggttttcaccttcgagcacggcgtagcaggcgatcggcacctggcaaccaccattaaggtgcttgttcagggcgcgctcggccgtgacgcgcacttcggtatcgtggtgatcgaggggtttgagcagggtatggatttcgctgtcggcggtgcggcattcgatacccacggcgccttgtccaccagcgggaaggctatcctcgacgctaatggctgaggtgatacggtcttcaaagcccaggcggatcaagccggcggcggcgagaatgatcgcgtcatattcaccggcgtccagcttcgccaggcgggtgttgacgttgccgcgcaggaagcgaatctgcaggtccgggcggcgagtcagcagctgtgcctggcggcgcaggctcgacgtaccgacgatgctgcccaggggcaactcatccaacgatgcatacgtgttggaaacgaaggcgtcacgcgggtcttcacgctcacagatgcaaaacaggcccaggccttcgggaaagtccatgggtacgtctttcatcgaatgcacggcgatgtcggcttcattttccagcagcgcggtttccagttccttgacgaacaggcccttgccgccgatcttcgacagtggcgagtcgagcagcttgtcgccgcgactgaccatgggcaccagggacaccttcaggccagggtgggcctgctccaggcgtgctttgacgtattcggcctgccacaaggccagggcgcttttacgggtggcgatgcggatttcgcgagaggacatggatcaatccgtactgaatagatacggcagataataacagctcaggcaaatacgctttgatttgaatcagcaagtgcggggcctccctggccacgtcgcaccgggatatggaatgcaggcctcgctacagcccgtgggctaaagctgctgcatcatcttgcgcacaccggccacatgccgtcggctgacgatcaacgcgtcgccgttaaggcctttgaggaatagctggaaatgccccaggggcgtgcgctgcaaccgttcgatgcgctcacgggccaccagcgcgttgcggtggatacgcacgaagcggtcgccgaattcatcctcaagcgccttgagcggttcatcgagcaacacttcgccgccctggtgacgcagcgtcacgtacttgtgatcggcaataaaatagaccacttcacccagcgggataagttcgatgcctttgcgggtacgggcgctgatatgactgcgtggcccgttaccactttgggcggcaggctgagtcagggcggcaagctggacgcgcgttgggcgctcagcctttttgagggccttgagcaaggcgtcacccaccaccggtttggtgaggaagctgacaccgctggcttccagcgtttccgcggaaaactcttcaccggctgcgcaaaacaccacggcaggtggcgactctcgttcgctcaatcgagccgcaacttgcaagccatcgaggcccggcatacggatatcgagcaacaccacatccggcttgaggctgtcgatcagcgtcaacgcctcttcgcccgtggtggcgctcggttctaatactgcgtaaccctcgagctcactgaccagacggctcagtcgctcgcgggcttggggttcgtcatcaacgatcaggacattcatattgcgctggattcctgcgtgagtctcgcacaaggatagcgtagacaggtgcggtgacttgcgtcacagcgatccacgctaagactagcgcgagcggcaaaaagtgccctgagagtggcacccatatttacccggacctgttcaatagcgcccaagacctgctgccttcgggcatcgtcgtagggtttgctgatacacaatccgaatacccccctttttttaatggatagtctgggctctgaccgcattacccgactttggtgcattcacacactatcagtccaactgtagacgctcgctgagacgacattgctcaatcgtcaaatatcgtttcaataaagccccttcgctcagtctcgtcctggacgcggtcggcggcaaggcacttagccatcctttgcacaaataaaaatgccgacgacccgcggcaccgcgtccacgggcaaccctgttattatcgccggcacacttccatgcctcttattaagcagatcacgagcgaatccatgagcaccgacaagaccaaccagtcctggggcggccgcttcagtgaacccgtcgacgccttcgtcgcccgcttcaccgcctccgtcaccttcgaccagcgcctgtaccgccacgacatcatgggctccatcgcccacgcgacgatgctggccaaggtcggcgtgctgaccgatgccgagcgcgatagcatcatcgacggcctgaccaccatccgtggcgagatcgaagccggcacgttcgactggcgcgtcgacctggaagacgtgcacatgaacatcgaggcccgcctcaccgaccgcatcggtgtgaccggcaaaaagctgcacaccggccgtagccgtaatgaccaggtggccaccgatatccgcctgtggttgcgtgacgagatcgacctgatcctgtccgaaatcacccgcctgcagaaaggtttgctggagcaggccgagcgtgaatcggacaccatcatgccgggcttcactcacctgcagaccgcgcaaccggtgaccttcggccaccatctgctggcctggttcgaaatgctcagccgcgactacgagcgcctggtggactgccgcaagcgtgccaaccgcatgcctctgggcagcgccgctctggccggcaccacttacccgatcgaccgcgagtacaccgcacaattgctgggcttcgacgccgttggcggcaactcgctggacggcgtgtcggaccgtgacttcgccatcgaattctgtgccgccgccagtattgcgatgatgcacctgtcgcgcttctccgaagagctggtgctgtggaccagcgcgcaattccagttcatcgacctgccggaccgcttctgcaccggcagctcgatcatgccgcaaaagaaaaaccccgacgtgcccgaactggtgcgtggcaagagcggccgcgtgttcggcgccttgatgggcctgctgaccctgatgaaaggtcaacccctggcctacaacaaggacaaccaggaagacaaggagccgctgttcgacgccgccgacaccctgcgagactcgctgcgcgcgtttgccgacatgatcccggcgatcaagcccaagcacgcgatcatgcgtgaagcggcgctgcgcgggttctctaccgcaaccgacctggcggactatctggtgcgccgtggcctgccgttccgcgattgccacgaaatcgtcggccatgctgtgaagtacggcgtggacaccggcaaggacctggcggaaatgagcctggaggaactgcgccagttcagcgaccagatcgaacaggacgtgtttgccgtgctgaccctggaaggttcggtgaatgctcgtaaccacgtgggcgggactgcgccggcgcaggtcaaggcagccgtcgtacgcggccaggctttactgtctagccgctgaaaaatgtgggagggggcttgcccccgatagcggtgggccagccagcacatgtgttgcctgacactctgctatcgggggcaagccccctcccacacttgatcactttttggctgcgatcatcgccacaaacgccggcatcgccgcctccctgtccgccgccaccttctgtgcgttgggcatggcatgcaaccgctccagcaacgccttggccgccggcatgtcagccagaaaatccaggccaaacagcttctcgcccaccgcacaggcgaggttcacgctgtacatgaagtacaaatccgcaatcgtgaagctttcccccgccacatacggcgcgaacttgccgtgcctgctcagcgcaccgacccccagtagcaactcggacctggacttctccttgatcgcctccggcaccggcatgcccataaacgcttcggcgtaacacgcgcgggccggcagctcgatgtacaactcgatctccctgcacagcgccagcacctgggctcgctggaacggctcggcgggcagcagcgaaggcccttcctgggtctgttcgatgtattcgaggatcacgctggtttcgttgataaacccctgcttgacgccgaggaccggcaccttgccacgtgggctgaccgcaaagacatcgggggtctgcccggagaaaaaaggcacctcttcgaaaggcagccctttctccagcagcgccagcttgaccatgttgtagtagttactgaccgaaaatccgtagagcttgagcattgcaggtgcctccaggccgggaatggggttggctgcaagggttatagccccgagggcccggccttgccagcagcatcagccgcctgaatgggggtagactggcgccctttccttgaggagcctgccatgagcgagcctaccgatatcgacaacgacgaagaagaattcgccgaaaccaccctgatcgaagcgatcgaaaaccagatcgaaagcgaaaacccaccggcggccaaagccacgttcaacaagctgaccctggtgggttacgaacgtgaagagattctgcaactgatggcccacgtgctggctgtcgaaatcgatgcgctgctggaagaagaccgcgccttcaataccgaatggtatgaaactgcactgcgcgccctgccagaactgcctccggaaaagcaataatccaggggcgcagcaacacgctggacagttcggcaaagtgcgttcaccttatggcctgctagcctctaataaattcttagaaagtctggagtccttatgtcgtatacccctgagttggttgccgaactggaaatccttgtgctcttcccattggacagcaccaaggaaggtctgaaagttcaccagaccgctgcgcccactgccatcgccgctgccatgcgcctgcacgcgaaaggacttatcgaccaaccggacgggggctacctgaccagccttggccgggacgctgcagaacaagcccagaccctgctgactatcttgaccaccgccaccaccaaagaagccgcctgatacctgacaccgcccatggagtccgccccgtgcggattccgagggcgttgccgtgcacgcgcaaaaaatctgacgtcaaaaaccatttctctctaaacctcctacgctactggctgtaaactcctacacggctgcccacgtcgggccctgcgagccaccgacctcgacatgacccgcacccatgaaatccgccccgacctggacgaaggcatcgaccgcaaggtgctggcccaattgcgtgcgcgtttcatggccctcaacgaaggccgcatggcccgggctgtcgaagggctgacaccgcgccagcaaagcgtgctgaccttgttgccgctgttcttccacgtcaatcacccgctgctgcctggctatgtgtcgggcagtacaccggccggcctctcgaatttcgagcccgacgcccaggcgttgaccgaagcccagcgcctgacccgctcgttctcctacaagccacgccacggcaacccaccacggccaatccacggcctgttcctcatgggtagccttggcaccctggcccaggccgaccagagcgacatggacgtgtgggtgtgtcacgcccccgatctcggcgaaaacgaactggccgaactgcgcaagaaatgccaactgctggaagcctgggccttgaccatgggcgccgaggcacacttcttcctgatcgagccgacacgcttcgtgctcggtgagcgcgacacccaactgagttccgacgattgcggcaccacccagcattacctgctgctggacgagttctaccgcaccgccatctggctggccgggcgtacgccgatctggtggctggtgccggtgtatgaagaaactcgttatgccgagttcacccacacgctgatttccaagcgctttatccgcgccgacgaaaccctggaccttggtcacctggcgcgcatccccccgggcgagttcatcggcgccgggctgtggcaactattcaagggcatcgagtcgccctacaagtcggtgctcaagctgctgctgaccgaggtctacgccagcgagcacccgaacgtgcactgcctgagcctgcgtttcaagcgggcggtattcgccaaccagatggatctggatgagctggacccgtacatcgtggtgtaccgccgcatcgaggaatacctcaaggcccgcaacgagcccgagcgcctggaactggtgcggcgcgcgctgtacctgaaggtcaaccgcaaactcagcgccggccagcgcagcaccagctggcaacgcctactgctggagcgcctggcccatgaatggggctgggaccagcgccaactgacactgctggacagtcgcagccagtggaaagtacgccaggtcgcctccgagcgccgcgcactggtcaacgagctcaattacagctatcgcttcctgacccagttcgcccgcaccgaacagaccgtcagcctgatcaacaagcgcgacctcaatgtgctgggccggcgcctgtacgccgcctttgaacgcaaggccggcaaagtcgagttcatcaaccccggcatcgccccggacttggccgaagacaccctgaccctggtgcaatcacccaatcgcaaggagccgggccagcaccactggggcctgtacaacggcaacctgacagccctggagtgggagcacttcgcgccgatcaagcgcagccgcgacctgctggagatgctcacctggtgccatcgcaacggcgtgatcgacagcagcacccgcctggccctgcaccccggcaccagcgacatgaccgagttcgagctgttcaacctgctgggcagcctgcaacagagcatcgccctgcccctggccagcgtcgatgaagagcgcctgctgcgctcggcagtacccgaggaagtgctgctactgatcaacgtcggcgtcgacccgctcaagcaccaccgcgacctgaacatcctgatgaccaccgagcgcaccgactccctgagctatgccggggtgcgcgacaacctcgtgctgaccctggaccaagtcacgctcaatagctggaacgaggtgatggtcagccgctacgacggccctcacgccctgctcgactgcctgcgcgactacctcaaccagttgccggcagaccatctgccacggctgcgggtgcgctgcttctgtcacaaccgtgcgcagttcattgcccagcgcgtggaagaaatcttcgacaccgcgcagaacctgctgctgggccagggcaatcatcgttacctgctccaggtgcagcagcactatcacgtgatggagttgataccgggccaggccactcacgtgtcactgccgacccaggaggcgctgatcgcctacctcagcgaagaactggccagctacagcccgctgcacctggacgccatggcactggaagaccatgacctggcgctgctgctgccgatgggcctggccgattgtgtgcaggtgttttaccgggtcaacgagggcttcgccgagctgtatgtgctggatgagttcaacgcgctgtggcaacagcgcttgccgttccatgacgaacagagcctgctggcgccgttgcagcgtttcttgcagtcgatcatttatcgccgcgacgcgctgtcaccgctggacccgcatgagccactgggcgcagtgcaaaccttgtattaccaactgttgccgtcgggcagcggtcgcgcgcgcggcatcgagcctcgtcctgcgccgttgaacccggcgaacaaaccgttctatgacgtgcaggcgattatcggcaaggcagcgctgggccaggtggggatcaccctgtactgcaatcagcgggagttttccgagctggaatttggcgaccagttgtttgcggtggtcgcccaggaaatcgtcgggcaacgccgggagcccgaacgttaccgctgctacatcaccgacctcgacctgtccggcctgctcggtgatgtgcaaagcccaagcaacctgtacctgcggtacaaggccgagctggaactgtcgctcaacgaggcgctgggccagatttaaagggggaaggcaccgccgtctttaggctggccttcaacactgagcaattccagcttgagcgtcttgccacccggggccggccagtcgatgtgctggccaacctgcagacccagcaaggcgctgcccaccggcgccaggatcgaaatcttgccttcatcggcattggcgtctttcgggtagaccagggtcaagtggtaatccttgccgctgccttgctcacggcaatgcacgctggagttcatggtcacgacacccgcaggcacttcatcgtggccaaccacttcttcggcgcggtcgagttcggcttgcaacgcttcgacgccgggagattcgtcgcccaggcggtcgatcagttgctccagacgctgcacgtcaagacgggtgaggatgatggacggtgcggtggtcatgattcaggcagactccttttttctgcacaaaaaagcaaaaccccgccaggaaaggcggggttctcacgggcctcgatgagttgaggcgtatccggacactaccacagcgtcacaaataaacaagacagcctcaggcgtgggcccggcgctgctcggcctcggcgcagatgatccggcgccgtgcatcgtcggcagagcgccattcacggatgtcttccacatggcggaagcagccgaggcagactttctgctcatccaggcgacacaaactgatacaaggtgacggcaccgccgggctgacattactgaacagtggcttgggcggacgtacggttgcagactgggtcacgatcaaatctcgtcgaagtccagcgcttcgccggtatattcctcgaccaggcgcgcgagcatttcacccaacagctcctcacttttgtcgcactgccatttgccgctttcttcgtcatagtcgaagtgaacgccaccggaacgtgctgcaagccacagctgacgcaaaggctcctggcggctgaagatcagttgctgaccgctctcgaacttgacggtcagcacgccagccgagttttccaggtccacgtccaggccgctgtcatcgaaaatatcttccagcgcctgctgggtcgaatccaccaggtcgtgaaaacgggcttcggtcaaactcattgtggcaacctcaaaagtgtctggttttgctcaagcgccgcacgatacgggcgagccccgccgattgcaaaggataccgattccatcgcgattggcggtacgaaatatccacggccagcgtagtccacttcgtaaccatgtcggcaaacccccgccggacgggtattccagcgcataggcaagctggcgggtggtcggtatactcgggcgcaattaatgcatattcaaggatttcgccatgaagcgcctgatctcttcccttgctgcgctcgtcgcggtcgcttgcctcgttagtgcctgtggtcaaaaaggcccgctgtacctgcctgatgacagcaaagacccgaatgaacaggcgcaatcgtcgcaaaaaccatccaaagcgcataagcacgacacctacgaataagggtactccatggacgcttttaactaccgggacggcgagctgttcgcggaaggcgtggcgttgtccgcgattgcccagcgctttggcaccccgacctatgtgtactcccgtgcgcatatcgaagcccagtaccgctcgttcaccgatgcgctcgacggcgtgccgcacctggtgtgctacgcggtcaaggccaactccaacctgggtgtactgaatgtcctggcgcgcctcggcgctggttttgacatcgtctcccgtggcgagctggaacgtgtactggcggctggcggcaaggcggacaagatcgtgttctccggcgtcggcaagacccgcgaagacatgcgccgcgccctggaagtcggcgtgcattgcttcaacatcgagtccaccgacgaacttgagcgcctgcaggtcgtggccgccgagatgggcgttcgcgcgccgatctccctgcgcgtcaacccggacgtcgacgccggcacccacccgtacatttccaccggtctcaaagagaacaagttcggcatcgccattgccgacgccgaagacgtgtacatccgcgccgcccaactgccgaacctggaagtgctgggcgtcgactgccatatcggctcgcaactgaccagcctgccaccgttcctggatgccctcgatcgcctgctggcgctgatcgaccgtctcggtgaatgcggcatctacctgcaccacatcgacctcggtggtggtgtaggcgtgcgttatcgcgacgaagagccgccgctgattgccgactatatccaggccgtgcgcgagcgcatcgaaggccgcgacctgacgctgatgttcgagccgggccgctatatcgtcgccaacgcgggcgtgctgctgacccaggtcgagtacctcaagcacaccgagcacaaagacttcgccatcgtcgacgcggcgatgaacgacctgatccgcccggcgctgtaccaggcctggatgaatgtcaccgccgtgacgcctcgcgccagcgaagcccgcgcctacgacatcgtcggcccgatctgcgagaccggcgacttcctggccaaggatcgtcagctggccctggaagaaggcgatctgctggccgtgcattcggctggtgcctatgggtttgtcatgagttccaactacaacacccgcgggcgtaccgccgaggtgctggtggacggtgatcaagcgtttgaagtgcgtcgccgcgagacggtagccgagttgtatgctggcgaaagcctgctgccggagtaagccatgctgctgcgttttaccaagatgcacgggctgggcaatgatttcatggtcctcgacctggtcagccagcacgcgcatatcctgcccaagcacgctaaacagtggggcgatcgtcacactggcattggtttcgaccagttgctgatcgtcgaggcaccgagcaacccggaagtggatttccgttatcggatcttcaactccgacggttccgaagtggaacagtgcggcaacggtgcgcgctgcttcgcgcgttttgtgctggacaagcgcctgaccgccaagcggcagatccgcgtcgagaccaagagcggcgtgatcgagctggatatccgcagcgatggccagatcagcgtcaacatgggcgcgccacgcctggtgccagcggatattccgttccaggccaccgagcaggccgtcagctatgcgctggacgtggacggcaagaccgtcgacatcgctgcagtgtccatgggcaacccccatgccgtgctgcgggtcaacgacatcaacaacgcgccggtgcatgagctgggcgcgaaaatcgaacaccacccgcgctttccggcacgggtgaatgtgggcttcctgcaggtgatcgaccgtacccgcgcgcaattgcgcgtgtgggaacgcggcgccggcgaaacccaggcctgcggcaccggtgcgtgcgccgctgccgtggccgcgatcagccaggggtggatggattcgccactgctgatcgacctgcccggcggacgcttgtccatcgagtgggcaggccctggccacccggtgatgatgaccgggccggcctcgcgcgtatacgaaggacaggtccgtctatgagtgagccaagccaatgaccgataagcctcaagtacccgcacccgctaccccgagcgacagcctggaggccgccactgttgcggcgtaccttgaggctaacccggacttcttcgtcgagcacgaagagttgctgccggcactgcgcatcccccatcaacgtggggataccgtatcgctggtggaacggcagatgaagatcctgcgcgagcgcaacattgaaatgcgccacaagctctcgcacctgatggacgtcgcccgcgacaacgatcgcctgttcgagaaaacccgccgcctgatcctgaccctgatggacgccaccagcctggaagaaacggtgatcgcggtggaagacagcctgcgccaggacttccaggtgccattcgtgagcctgatcctgttcagcgacaacccgatgccggtgggtcgatgggtcagcggcagcgacgcacaaaccgcaatcggcggcctgctgtccgagggcaagaccatcagcggcaccttgcgcgagcatgagctggacttcctgttcggcgccgaacagcgcaagcagatcggctccaccgccgtcgtcgccctcagtcatcaaggcctgcatggcgtgctggccatcgccagccgcgatcctcagcactacaaaagctccgtgggcaccttgttcctgacctacatcgccgaagtgctgggccgcgtcctgccgcggttcaccaccgccctgcgcgcggtgcgctagccatggaacggcaactggacgcttactgcgctcacctgcgcaacgagcgccaggtgtcgccccataccctggaagcctatcggcgggacttgaacaaggtcctggcgtactgcgagaaacaacggatcgacagctggaaggccctggatatccagggcctgcgcagcctgatcgcgcgcctgcaccaggccggccaatcctcgcgcagcctgtcacgcctgctctcggcggtgcgcgggctctatcactacctgaatcgcgagggcctgtgcgaccacgacccggccaacggcctgtcgccgcccaagggcgagcggcgcctgcccaagaccctggacactgaccgtgccctgcaactgctcgatggtgcggtcgaggatgacttcctggcccaccgcgaccaggcgattttggaactgttctattcctcgggcctgcgcctttctgagctgaccggcctgaacctggatcaactggacctggcagacggcctggtgcaagtgctcggcaagggcagcaagacccgcgtcctgccggtaggccgcaaggcacgggaggcgttgcagctgtggttgccgctgcgcctgttgaccaacccggcggacgatgcggtgttcgtcagccagcaaggccggcgtcttggaccaagggcgatccaggtgcgggtgaaggccgccggggagcgagagctggggcagaacctgcacccacatatgctgcgacactctttcgccagccatctgctggaatcgtcccaggacctgcgcgcggttcaagagctgcttggccactcggacatcaagaccacacagatctatacccatctggatttccaacacctggcaacggtgtacgacagcgcccacccacgggccaaacgcatcaaggacggcgactcatgagtatcaagctgatcaccttcgacctggacgatacgctctgggacaacgtacccgtcatcatcagcgccgaagcgtcgatgcgcgaatggttggcgcttaacgccgccaaagtcggcgatttgccgctggagcacttcgccagtcttcgccagcaggtgttggagcgccatcccgagctgaaacaccgcatcagcatcctgcgccaccgggtgttgaagcatgcgtttgaagaggctggttatccacagcctgaggccacggaaatggcggatgagtgcttcgaagcattcattcatgcgcgccaccagctcaccccgttccccgaagccgagcccatgctcaaggcactgcgtcagcacttcctgctgggtgtgatcaccaacggtaatgcggatgtgcagcgcgttggcctcgcggactacttccattttgcgctgcgcgccgaagatatcggcatcgccaagccggatgcgcggttgtttcaggaggcgttgcagcgtggtggcgtagacgctggtgcggcggtgcatgttggcgatcacccgggggatgatattgccggggcgcagcaggcggggttacgggcggtgtggtttaacccgacgggtaaggtatgggagggagacaagcgaccggatgcgcagattcgtagcctgacagagttgccggaactgctgcgcagctggaagtaataccgcaggtcaaaatgtgggagggggcttgcccccgattacagtgggtcagccaatatattcgttggctgatacgccgctatcgggggcaagccccctcccacattttttatcgccggtgacctccaggcatgaaaaagcccgcagcgacggcgggctttttcttacaagcaggtgacggacctcaaataggtcggctgccgtacttgttatccggcttcttcggtgggtctgccaccacgttggcctcgacttcctgcactttgccgcctttagcgaggaattcttccatcgcacgggccagggcatcacgctctttgttcttggcttcaacgcttggcaattcgtctaccgacacagctgccttggctttgcctttggcgaccgggacaggtgcatcatcgccaccgtcgtcgtcggcaacgtcttccgccgccgcttcgaggccttcttcggtgtcgtcttcgtcacctacttcgagttcgtcgttttccagatcatcgtcgctcatgttctacctcatgacttgcgaaaagcagattagttatagcccagcttcaccctctgtcgacggctgccggaaaaaaatcaacatccactggttaaccagtggcttatgccccatcaccgtgcaaggtggcgaggactttacgagcaccgccatgatcacggtgctcgcccagataaacaccttgccaggtccccatcgccaagcggccggccttcaccggcaaactcagctggcagcccaggagactggccttgaagtgcgccggcaggtcgtccggaccttcgtcgttgtgttcgaaccctgcacggccttgcggcaccagcgaattgaaataacgttcgaagtcacggcgtaccgccgggtcggcattctcgttgacggtcaacgaggccgaggtgtgctgcagccacagatgcaacaagcccacacgacaggccttcaattcaggcaagccggccagcaactcatcggttaccaggtgaaagccccggggcttggcccgcagggtaatcagggtctgttgccacatacagttctccgcccatcggcgcgcattctagcgcgctcagggaaaaaacaaagtgccgaatacgcctacatgcctgtaagacattggcatgcggaaaagtgccgtgtgcatcccatcacaaacatcgcttaaaaaccgctacagcgtgttacgactgacaaacaccaggcaaaaaaatgcccggcaagccgggcatctttttttcgcgtacttacaagttgtagccgcgttcgttgtgttgcgccaggtcgaggccgaccgcctcttcctcttcggtcacccgcaggcccatgaccatgtccagcaccttgaggatgatgaacgtcacgatagcggtgtagatcaccgtgaagccgacgcctttggcctggatccagacctgtgcagccacgtcagtcaccgtgccgaagccgcccagtgctggggctgcgaacacaccggtgaggatcgcaccgacgataccgccgataccgtgcacaccgaatgcgtccagggagtcgtcgtaacccagcttgcgcttgaggctggtggcgcagaagaagcagatcacaccggcgaccaggccgatcaccagggcgcccattgggcctacggtgccagcagccggagtgattgccaccaggcccgccaccacacccgaggcgatgcccagtgcgcttggcttaccgtgagtgatccactcggcgaacatccagcccagcgccgcagcagcggtagcgatctgggtgaccagcatcgccatgccggcagtgccgttggccgcagcggcagagccggcgttgaagccgaaccagccgatccacagcatcgccgcgccgatcagggtgtaaccgagattgtgcggtgccatcggggtggtcgggaagcctttacgcttgccgagcacgatgcacgccaccaggccagccacaccggcgttgatgtgcaccacggtgccgccagcgaagtcgagcactccccagtcacccagcaacgaacccggaccgccccacaccatgtgggcaatcggcgcatacaccagggtgaaccagacgcccatgaagatcagcatcgcggagaacttcatacgctcggcgaacgcaccgacgatcagcgccggggtgatgatggcgaaggtcatctggaaggtgacgaacaccgcctcagggaacagcgccgcagggccggtgatgctcgccggggtcacacccgcgaggaacaacttggacaaaccgcccacgaacgagttgaagttgacgacgcccgcttccatcccggtggtgtcgaacgccatgctgtagccgtacacgaaccacaggatggtgatcaggccggtgatggcgaagcactgcatcatcacggaaagaatgtttttggagcgcaccatgccgccgtagaacagcgccaggcctggaatggtcatgaacagcaccagcgcggtggatgtgagcatccacgccgtgtcgccggaattgaggactggagccgccacttcgtctgccgccatggccaggcttggcattacgatggacaacagggctccgagccctgcgaatttacgcagagtcatattgttttctcctggggcgttggggtttggcggcttagattgcgtcggtatcggtttcgccggtacggatgcgaatagcctgttccagattgaccacgaagatcttgccgtcaccaatcttgccggtgttggcagccttggttatcgcctcgataacccggtcaagatccttgtcgtcaatggcgacatcaatcttcaccttcggcaggaaatcgactacgtattccgcgccgcgatacagctcggtgtgacccttctgccgaccgaagcctttgacctcagtaacggtaatgccctgcacgccgatctcggacaacgactcgcgtacatcgtccaacttgaacggcttgatgatggcagtgactagcttcatgaaaactctctcccgaattggtggacttgccccaggaaaacaaacccgtctcaagtctaagcgcagtgcctggctttgtaacgcgtcgtcgcctcagcatttgccgttgcgacgccagcgaaccactggtgacgaaacctgtacccctgatccgtcggcgcactgcattcgtcacagcgactgcatcagtgcatgggtcatgatcgtctaagcagaaaccttgccagctccgtaaaaatcactgaaatcagtcctttgcccactttctcccaactgcggggctttttgatggcgtcaatgcgcacaaaaacagtgcgccaccgcccggcccgctgcgcgaaaagcgtgcgctcgccgccacggaaaagactatagacgctgcgtgatacactgccggccaacagttttccggaatatttcccatgctcgcgcccaaagacctcctcgacgccctgagcggccacgcctctcgcctgttcagcggcgacaccccgctgccccgcaatgaaatcgaaagccagttcaaggcgctgctgcaaagcggcttcagcaagctcgacctggtgagccgggaagagtttgatagccagatggtggtgctggcccgcacgcgggcgcggttggagagcctggaggcgaaggtagcggagttggaagctaggttgacgccgccctctgctgaataaacgcggtcagtgtgggagctggcttgcctgctcccacataaagcgctgcgaacgactctggatacgttctgtaaaacctccctcgcctcgcatttccccacctcgtctacccttgaaaaacccgcaggaagcggccctcttttcaaggaacgagcatgtccctcgccatcgtccacagccgcgcccagatcggcgtcgaagcgcctgccgtcaccgtcgaagtgcacatggccaatggtttgccgtccctgacactcgtcggcttgccggaaacagccgtcaaggaaagcaaggaccgggtgcgtagcgccattctcaactccgccctgcaataccccgcccgacgcatcaccctcaacctggcgcccgccgacctgcccaaggacggcgggcgctttgacttggcgattgcgttgggcatcctggcggccagcgtgcaggtgccagccttgctgctcgacgacgtggaatgtctgggagaattggcgctgtccggcgaggtgcgcgcagtgaaaggcgtgttgcctgcggcattggcggcgcgcaaggccgggcgcaccgtgatagtgcctcgggcgaatgccgaggaagcgtgcctggcctcggggttgaaggtgatcgcggtggatcatttgctgcaggtggtggcgcacctgaatgggcatcagcctatagaaccctacaaatccgacggcttgctgtacctgaacaagccatacccggacctgagcgaagtacagggccagctcgccgccaagcgcgcattgctgattgcagcggcgggcgcgcataacctgctgttcagcggcccgcccggcaccggcaagaccttgctcgccagtcgcctgccgggtttgttgccgccgttgagcgagcaggaagccctggaagtggcggcgatccagtcggtcgtcagccttgcgccgctgagtcactggccacaccgaccgtttcgccagccgcaccactctgcctcaggtccggcattggtgggcggcgggtcgaaaccgcagccgggggaaattaccctggcccatcacggcgtgctgttcctcgatgagttgcctgagttcgaccgcaaggtgctggaggtgctgcgcgagcctctggaatcgggtcacatcgtcatctcccgcgcccgcgatcgcgtcagcttcccggcccgcttccaactggtagccgccatgaacccctgcccttgcgggtacatgggcgaacccagcgggcgttgtcgctgcacgccggagcagattcagcgctatcgcaacaagctctccggccccttgttggaccgtattgatttgcacctcactgtggcgcgagaaaccaccgcattgaacccaacccagcaggcgggcgataacaccgccgaggcatcggcacgggtcgcccaggcccgcgatcgccaacagcaacgccagggctgtgcaaatgcgttccttgatctgccggggctgcgcaagcactgcaagctgacgaagaccgatgaaggctggctggaaaccgcctgtgaacggctgacactatccctgcgcgctgcccatcgcctgctcaaagtggcgcgtaccctggccgaccttgagcacgccgagagcattactcgaccgcacttggcggaagcgttgcagtatcggcccgcggccgtcggctagggtgcctctgggaagtccaacagcaggcgcgccacttccatcacttcatccaaggccgcttccgccgactccatggagggtttgagcatcaggtcgtcggcatagcccatcgccacggcaaagatctggcgggcagcgcgttgtggcgagtcacaacgcaggacattggcagccacaccccgctcgatcacctcgacgagcatgccttgccattgggcgttgatcgccaggtaagcctgggccatttccgggtcctgcatcgcttcgtcccaagcatccagccacagtgcccaccctgcatcagcggtgcttggcaggcagtcacgcaaaaaacccacaaaggcgtccaagggcgctgcttctgccaggggcgcgcgcacttcgtccaactgttcgttggcaaaccgcacgaaggcttcgcggcgcagttccttccagtcgctgaagtagtgatagacatggctgcgggacaggccggcatgttcggccaggtcgcgggtggacacatcggcaaaacccttgctgcgaaacagctcaagggcggcggcgatgatctggtctttacggtcgatacgcgacatgggcaattccttccaggcaccggcagataagcggcgcttgctttttgagcgatcgctcaaggatacttgagcagtcgctcaataatagcgtctatcactcctttggtgcaccccatgtcatccgccacacctcaaatcctgatcgaagaaagccggaaaatcggccagcaatccgccggccagacgctcaaggccattgccaaagcctatccgggcaagctgtttgccacgctgtcgctggtcgcgctggagaacgcgctgctgctggcctacccgttgtttgccgggtttgcggtggacgcgatcatccgtggcgacgccagcaacgcgctgttctacgccgccgtggtcctggcattctgggtggtcggcgcggcgcggcgggcgttggatacgcggaccttcacacggatctacgccgatctggcggtgccggtgatcctcaatcaacgcctgcagaaccacagcacgtcgaaatcggcggcacgggtggtgctcgcccgggagttcgtcgacttctttgaaaagcatgtaccgatcattgccacggcgctggtgtcgattatcggcgcggcggtgatgttgatcgtgatcgagccctgggtaggcctggcgtgcctgggcgcactggtgctgtgcatcacgttgttgccacgctttgcccggcgcaaccaggagctgcatgaacggctgaacaaccggctggaaaaagaaatcggcctggtggaaaaggtcggcgcaccgaccctgcggcgccactaccaggtgctttcacgcctgcgcatctggctgtcggatcgtgaggcggctgcgtacctgtttctgggtacgctggccgccttgctgtttgtggtcgccatcagccaattggcgctgtcacccgcggtcaaggctggccatatctacgcggtcatgacctacctgtggaccttcgtcaccagcatggacgaagcccccggcatggtcgaccaactggcgcgcctgaaggacatcggcaagcgcgttgaccctggcctgggcgatcgctaggcctcaacgaaaccggtccacctcatgccgcaagcccgccgccagggtttcgagttccttggcggtgatcgccaggttcgacaccacttcccgctgctcgctgttggccagcgcaatgctctgcaagttgctgctgagcaaggtcgcggtgctgctctgttcctgggtggcggtggtgatcgcggcaaactgctgaccggccgagcggctctgctcgtcgatacgcgccagggccgacgccacatcggcgttgcgcgacaggccttcctgcatcagcacattgccgtgttccatggtgctgatggcgttgccggtttcctgctggatgctctggatcatcccggagatttcatcggtggcctcgcgggtgcgcgacgccaggttgcgcacttcatcggcgactaccgcaaacccacgaccctgttctccggcacgagccgcttcgatggcggcattgagcgccagcaggttggtctggtcggcgatcgaggtgatcacgccgacgatcccgccgatctcctgggagcgctggcccagggtattgatcaccgtggccgtgctgttgagcgcttcagcgatgtgctccagggacgacgacgcctcttgcatcgagttgcgcccgatgcgggtttgctgggcgttttcctgggccaggcgttcggtgctgcccatgttgtcggcgatgttcagcgaggtggcactgaactcttccaccgcgccggccatgctggtgatctcgccggactgctgctccatgccttcataggcgccaccggacaaaccggacagcgcctgggcacggctgttgacctcttcggccgccttgcggatatgcgagaccatggtcgacagcgcttcacccatctggttgaaactgcgcgccagttggccgatttcgtcatggctggacacgttcaagcgtgcgctcaagtcgcccgcgcccaaggcttcggcctggcgcaccaggtctcccaacggcgccagcttgctgcgcagcagccacaccgttgcaccgaccgccagcagcatggccagcacgctgccgatcaccaggcggataccgacgtcccacgtcaccgagcggatttcggccttgggcatgctcgcgaccacggcccacggcccgccttcgaaaggcaccgacacgctgtagaagtcttcgttcttgtctgcccagaaaccccctgtacccggcgtcttggccaggtccagcatcacgggaatggcttgatccagcgcctgcacgcccgccggcggtaccagccagcgcttctgctcatccagcaaggcgagggagccggtctggccgatgcggaaacgcttgaggttctcgaactgggcattctgcgcatcggtgtagtcgaacccgatgaacaacaccgcgatcacctgcccactgctgtcgcgcaccgggctgtactgggtcatgtaggagcggtcgaacagcaccgcgcggccgatataggtctgcccgccgagcacccgctggtaagccgggccctggcgatccagcaccgtgccgatggcgcggttgccgtcctgcttggtcaacgaggtgctgatacggataaagtcttcgccgctgcgcacgaataccgtggccacgccgccggacatctgcttgaactcatccacttcattgaagttgttgttcaacacctgattgcccaggtacaagcttggggtctgcacaccggccacggtcacaagctggtccgcatgcacgctcaagccagcgccgaagcgcttttcaaacagcccgctcaaacgctgggtactttcgcgcaaggtgctgtggaaggtgttgagttggtcggcgagcaaacgtgcctcgctggccaggtgctcctcgcgggtagcgaggttggcggagtcgagggaacgcaaggcaaacacggtgctgccgctgatgacgacagccagaatcacggctaatgccaggcctaactgggaggctatccgggcgcgaggttgagacatgacggctcctggccgaggccaggatcatcctgatctcatagcgctgctcggcaaattatctggtgggaaacgttggtgcacgatggttccaacacacctacttcggcgggctgaagcaatacttgagcgattcacaggggtatcacgcaaacgattgcacaaacggtcagcgactcctcaatcgaggcgttcgacctggggcagttccatggccttgacttccgcctgcagaaactccgccaagcgccgcaaacgctcaccgccggggcgggttttcggccataccaggtagtagttttcgccactggccaccgccgttggccaaggcaggctcaggcgcccctgggccacgtcttcggccaccatcagcaagtcgcccatggaaacaccgtaaccccgcgcagcggcgatcatgcccagttcgagagtatcgaacacctggccgcccttgagcgacacctgggacgccaaccccatgcgttgcagccaattgcgccagtcgcgacggtcgggcgtggggtgcaacagttcggcggtggccaggcgcgcagcatcccacggcccatcctccaacaggttcggtgcacctaccgggatcagcagttccgggaacaggtagctggcctcccaatccgccgggaagtgcccgtagctcagcaacaccgcgcagtcgaacggctcctgattgaagtccacctcgtccacgctcatccacgcgctggtcagttgcacttcattgcccggctgcaacgcccggaaacggctcagccgcgccagcagccagcgcatggtcagggtagacggcgccttcatgcgcaggatgtcgtcttcggcgttcagggtatggcaggcccgttccagcgcggcgaaaccttcgcgcacgcccggcaagagcaggcgcgccgcttcggtgagctgcaaggtgcggccgctacgctggaacaggcgacaggcgaaatgctcttccagcgtgcggatatgccggctcaccgcactttgcgtgatggagagctcctccgctgcccgggtgaaggaattgtgccgcgaggcggcctcgaatgcgcgcaaggcatacagcggggcaagacgtcgagacatcggcagattcctacagagcaataccgcaccctaccagatcagcaggcatgagtttaagtcatgtacatcatcgctttaatccttttgtgtaatgaaccgagagcgccgagaatcaagccttcccaaccttctgacttttcgagcgtgatgatcatgcaacatccggcacgtaccgaactctgggccattctgcggctgtcagggccgttgattgcctcacagttggcgcacatgctgatggtgctgaccgacaccctgatgatggcgcgcctgagccccgaagccctggccggtggcggcctgggcgcggcgacctactcgttcgtggcgattttctgcatcggcgtgattgccgccgtgggcactctggtggccatccgtcacggcgcgggcgatatcgaaggcgccacccgcctgacccaggccgggctatggctggcgtggctgatggccctggcggccggtttgctgctgtggaatctcaagcctgtgctgctgatgtttggccagaccgagaccaacgtgcactcggccgggcaattcctgacgatcttgcccttcgccctgcccggttacctgagtttcatggccctgcgcggcttcaccagcgcaatcggcaaggcgacgccggtgatggtgatcagccttggcggtacggtaatcaactacctgctcaaccacgcgctgatcgaaggcatgttcggcctgcccaagcttggcctgatgggcatcggcctggtcacagccatcgtcgccaacggcatggcgctgacgctgatgtggtacatccgcagcaaccgcacctatgcggcctacccactgagtaccggcctgctgcgcctcaacacccagtacctgcgcgagttgtggcgcctgggcctgccgatcggcggcacctatgcggtggaggtcgggctgttcgcgtttgcggcactgtgcatgggcaccatgggcagcacgcagttggccgcgcaccagatcgcattgcagatcgtctcggtggcgttcatggtgccggcggggatgtcctacgcggtgaccatgcgcatcggccagcactacggcgccgggcagttgctgcatgcgcgcctggccggtcgtgtcggcattggctttggcgcggcgatcatgctgggatttgctggcgtgttgtggctctattccgacccgctgatcggactgctcatcgaccacaacgacccggcgttccacgacgtgatcgtcctggccgtcagcctgctggccgtcgccgcctggttcgaactgttcgatggcgtgcagacaatcgccatgggctgcattcgcgggctcaaggacgccaagaccaccttcctgatcggcgcaggttgctattggttgattggcgcaccgtcggcctggctgatggccttcaccctgggctggggaccgaccggcgtgtggtggggcctggcgttgggcctggcgtgcgcggcggtgagcctgacctgggcgtttgaggcaaagatgaagcggatgcttcgccaggagcctgaacctcaaggctcattccaagccgaggccctgcacgattaacaatgtgggagggggcttgcccccgattgcggcgtgcccgtcactggttttttgactgacccaccgcaatcggaggcaagcctcctcccactttttgattggattgccacctcagcccagcagcgcttgctggcttttgccgaaagtcaggtactccaccaactccggcaacggcagcggcttgctgatcaggtaaccctgggcctggtcgcagccaaacaaacgcagcagcgccagttgctcaggcgtttcaacaccttcggccaccacttccaggttgaggttgtgcgccaggttgatcatggcatgcaccagcttgcggttttcttcgcgctcctccataccgccaacaaagctcttgtcgatcttcaacaaggcaatcggcaggctgttgaggtgcacgaacgatgagaagcccgtaccgaagtcatccagggaaaaccgcacacccaggcggccgagggcatccatggtctgcttgaccaggtcactgcggcgcatcacggcggtttcggtcagctcgaactccagccattgcgcctccacgccccgctcggcaatcagccgactgagggtcgagagcaactgactgtcctggaactggcggaacgagaggttgaccgccatgtgcaacggcggcaggccacgttcgcgcaggtcttgcatgtcgcgcagggcccgggagatcacccagtagcccagcggcacgatcaggccgctttgctcggccagtggcacgaactcactcggcggcaacaggccgcgctcgccatggcgccagcgcaccagggcttccaggccgacgatatggccgtcgtccaggtccaggcgcggctggtaatgcagctccagttcgtcacggcgcaaggcgcggcgcagctcgctttccaggtcggcgaggctgcgcgcgttgcggttgatacgttcgttgaagatatgaaaagtgcagccctgggtgctcttggcctgctgcatggcgatatgagcgtgccacatcagcgggtcggcaccggcacgggccctggcatgggccacgcccaggctacaaccgatcagcaggctttcgccatccacccaatagggctcggccatgacttcggtgatgcgctcggccatccactcggcacgctggggcgcacgacgggtgtcgatcagcagggcgaattcatcgctgcccaggcgcgccagttggtcgccgacctcgagctggctcttgagccgcgacaccacttgcaggatcaaccggtcgccggcctggtggccgagggcatcgttggcgtggcggaagttgtcgaggtccaagtggccgagggccaggccacggccttcattctcggccaggcgcgcggtcaacagggtctggaagccctggcggttggcaatgccggtgagcgggtcctgttcagccaggcgttgcagggtgttttccagcaccccacgctcgcggacgtggcgcaggcagcggcgcactgtatcggcatccaatacatcacgcaccagccaatcgctgacgccaagcggcgaaaccagcggttcctgttccagcaacaacacgcacggcaggctgcaacggccaggcccgggttgcaggccgggcgtggtcaagagtacggcgctgtggtcgtcatcgaacagacggctcacggattcccagtttggtgcgctgatcagcacagccccatcgcccatcggcgccaggcactcgcgcaataacgctgcccacgcgggctcatcggccagcagcagcaaacgcaagggttcgacaggcgtagacaagctagctccctagactctgcaaaaattcgtggcgacgcgcattatgacgtgcggcctgagaatcaccaatgataggggttatcaaacacgcgaactgtgaacattagcctcaaaacaaccctcacatcctgcggcaaagtatcaaaaccggcaaatttagatcgagtggtacgtcacactgtcgttctgacagagcagaatcctgccagcctgttaaaatgcccgcccttttgaacaacgactccctgaattctgtatgtcccgactcaatccccggcagcaagaagccgtgaactacgtcggcggccctctattggtgctcgccggcgcaggctccggcaagaccagcgtgatcacccgcaagatcgcgcacctgatccagcagtgcggcatccgcgcccagtacatcgtcgccatgaccttcaccaacaaggctgcgcgggaaatgaaagagcgcgtcggcaccctgctcaagggtggcgaaggccgtggcctcaccgtgtgtaccttccacaacctgggcctgaacatcatccgcaaggagcatgcgcggctgggctacaagccgggcttctcgatcttcgacgagaccgacgtgaagtcgctgatgaccgacatcatgcaaaaggaatacgcaggcgacgatggcgtggacgagatcaagaacatgatcggcgcctggaaaaacgacctgatcctgccgccccaggccctggaaaatgcacgcaaccccaaggaacagactgccgccatcgtctacacccactaccagcgcacgctcaaggcgttcaacgcggtggacttcgacgacctgatcctgctgccggtaaagctgttcgaggaacacgccgacatcctcgaaaaatggcagaacaaggtgcgctacctgctggtggacgaataccaggacaccaacgccagccaatacctgctggtaaaaatgctgatcggcaagcgcaaccagttcaccgtggtcggcgacgacgaccagtcgatctacgcctggcgtggcgcccgcccggaaaacctgatgctgctcaaggacgactacccgtccctgaaagtggtgatgctggagcagaactaccgctccaccagccgcatcctgcgctgcgccaacgtgctgatctcgaacaacccccacgaatttgaaaaacaactgtggagcgagatgggccacggcgatgagatccgcgtgatccgctgccgtaacgaagacgccgaagccgagcgcgtggccgtcgagatcctcagcctgcacctgcgcaccgaccggccctatagcgatttcgcgatcctctatcgcggcaactaccaggccaagctgatcgaactgaaattgcagcaccaccaggtgccgtatcgcctgtcgggcggcaacagctttttcggacgccaggaagtaaaagatctgatggcctacttccgcctgatcgtgaacccggacgacgacaacgccttcctgcgcgtaatcaacgtgccgcgccgcgaaatcggttccaccaccctggaaaagctcggcaactacgccactgaacgcaagatctcgatgtacgccgccaccgacgaaatcggcctgggcgaacacctggactcgcgcttcaccgatcgcctgtcgcgcttcaagcgcttcatggacaaggtgcgcgagcagtgcgccggcgaagacccgatcagcgcgctgcgcagcatggtcatggacatcgactacgaaaactggctgcgcaccaacagttccagcgacaaggccgcggattaccgcatgagcaacgtctggttcctgatcgaagcgctgaagaacaccctggaaaaagacgaagacggcgagatgaccgtcgaagacgccatcggcaagctggtgctgcgcgacatgctcgaacgccagcaggaagaggaagacggcgccgaaggtgtacagatgatgaccttgcatgcgtccaagggcctggaattcccctacgtgttcatcatgggcatggaagaggaaatcctcccgcaccgctccagcatcgaagccgacaccatcgaagaagaacgccgcctggcctacgtgggcattacccgcgcgcgtcagaccctggccttcacctttgccgccaagcgcaaacagtacggcgaaatcatcgattgtgcccccagccggttcttggatgaactgccgccggatgacctggcctgggaaggcaatgacgacaccccgaccgaggtgaaggccgttcgcggcaacaccgccttggcggacatacgcgcgatgttaaagcgctagaatcgactacttttcaatctactttcggcgcacaccgcgtcattagaggaagctttccgtggaagcactgcacaagaaaattcgcgaagaaggcatcgtgctttccgatcaggtactcaaggttgacgcctttctgaaccaccagatcgacccggcgctgatgaagctgatcggcgacgaattcgccgcactgttcaaggactcgggcatcaccaagatcgtcactatcgaagcatcgggcatcgcaccggcgatcatgaccggcctgaacctgggtgtaccggtgatcttcgcgcgcaagcaacagtccctgaccctgacggaaaacctgctgtcggcaacggtgtattccttcaccaagaaagtcgaaagcaccgtggcaatctccccgcgccacctgaccagcagcgaccgggtgctggtgatcgatgactttttggccaacggcaaggcgtcccaggcgctgatctcgatcatcaagcaggccggcgcgaccgtcgccggtttggggatcgtgatcgagaagtcgttccagggtgggcgtgcggaattggatgcacagggttatcgggttgagtcgctggcgcgggtcaagtcgctggaaggtggcgtcgttaccttcatcgaataacccctgccttaaagtggttgtaacagtgggagggggcttgccccctcccacattgaccctgtgttgcctgtcagtgcgcggtggcctgtaggccggcgagtaggagccgctggtacagatcctctttcagcccctccggcttacctaaccgcatccgctccagatgcttgggaaacacctccggttccggcgcatccaacgccgccttgcccagctccagaatctccgtcagcttgaatttgctcttgagccagttcagcgcccgcaacaaatcccgttcttcatcagtgaaatcactgcccagcggatactccggaaacaaccgacgatggcgtgcctgaatcccctgcaagcgctccggcgtgttatcggcaaagcgcggatccagctggaaatccttgggcagcttgccggccttttgcgcctccttgatcaaatcgtcctggaagcgtgagtcggtgatattgagcaacgcctcgatcaccttggcatccgtctgcccgcgcaagtctgcaatgccatattcggtgatgacaatatcccgcagatgccggggaatggtgcagtggccgtagtcccagacgatattggaactgacctcccccgctgactcgcgccaactgcgcaaaatcagaatcgaccgcgcaccttccagcgcatggccttgggccacaaagttgtactgcccgcccacaccactgagcacacgaccgtcttccaactggtcggccacgcccgcgccgagcagcgtcaccatgatcgcgctgttgataaaccgcgcatccaaccgctgcaggcgcttgagttcttcctggccgtacagctcgttgatgtagctgatgcgggtcatgttgaattcgaggcgcttggcgtgagtcatttcctgcaggcgctggtagaaactgcgcgggccaagaaaaaaaccgccgtggatcgaaatgccgtcgggctgcgccgcatcgtcgagcgtgccggcgttggcctgctgttgcgtggccacatccgggtagaccttgcgacggataatccccgcgtccgccagtaccaacaggccgttgacgaacatttcgctgcacccgtaaagcccccgggcgaaggggtcgacaccgccttcacggctgatcagcggtgcccactggtacacgtccaggtcggtcagcagcgagcgataggactcattgtcggcctggcgcgccagcaacgcggcggtcagcgcatcccccatggagccgatgccgatctgcaaggtgccgccatcgcgcaccagggtgctggcatgcaagccgataaaatggtcctggaaacccaccggcatattcggcgtggagaacaacgtggtgctgtctttttcatcgatcaggtaatcgaaggcatccatgcccagctcagagtcgccgggcatatagggcaaatcgctgtggacctggccaacgatcagcacggtttcaccggcatcacggcgcttggcgatcatcggcaacaggtcgagggtgatatccgggttgcagctcaggctcaggcgatccggatgttcgctgctgctggcgaccagttgcgccaccaggttcaagcccgctgcgttgatgtcgcgagcggcgtggctgtagttgctgctgacgtaatcctgctgcgccgactcgctgtgcagcaagctgcccggctgcatgaagaactgctgcacatggatatttttcggaaggctgtcgttgtgcaggtcggcgaggaaatccagctcggggtaatcgccgaacacccgctcgataaagggttcgagaaagcgtttctgcaaaccatcgcccatcgtcgggcggcccaggctcaacgcggtatagatggtcagcgcccgctccggcaacttggcgatgcgccggtacaaggcattggcaaaccggttcggcttgcctagcccgaggggcatgcccatgtggatatgcgccggcaaccgcgccagtacgtcgtcaactgcttgctcgattgaacacaactgcaccatccgaccctcctgaacattccatgattaggggttggaccgagcttgccgggtctttgctgcaatgaacagcgctgaaacaccaatcccaggcacaaaaaagccgctcgtaagcggcatttttgacgaagatcggcggatcagaggccagacatcttcttgattgcacccttgaggtcatcatccgagcaatcggcacaggtgccttttggcggcatcgcgttgataccggtgatcgccttggccaggatgccgtcaaggccgccctggtgatcggcgcgttctttccaggccgctgtgtcgccgattttcggcgcgcccaacaagccggtgccgtggcaagcgttgcagtgcttggcgatgatgtcatctggcgtcttcgcagcgccgccgcctgcggcgaccgccacctccatgcccttgcattcctggccctggacgcagacctggccgacaggctccaggcgcttggcaatatcatcattggtcgcagcttgagcgctgacagcccatagggccagtacggttgctggtgcagccagcattttcataattaggttcacgcgttcaccctcaatggtggctattcacgcctgcggccacggtttcgcaggcggcgaaagtataacggttagcccgcctggccgaaacaaccctattaaataaagggagattcgacctcacggaatacagctcgggtgcctctgcgacgctggcaggacgcctcttttcttaaaagttcgcgggtgtggctgcgctgattagtcgcgccggcacgtcgaacggattgcgaaaacgatggggcttggtgctttcaaagtagtagctatcgcccgcttcgagcacaaaagtttcaagaccgaccaccaactccaggcgaccttccaccagaatcccggtttcttcgccttcgtgggtgagcatttcttcgcctgtgtcggcgcccggcgggtagatttcgttgagaaacgcaatcgcccggctggggtgcgcccgtcctaccagtttcatggtgacggcgccgtcggagatgtcgatcagctcattggctttatagacgatctgcgtcggtatttcctggaggatctcctcggaaaagaactcgaccatcgacatggggatgccgcccagcaccttgcgcaaggagctgatcgaggggctgacgctgtttttttcgatcatcgaaatggtgctgttggtgacacccgcacgcttggcgagctcgcgctgggaaagacccttcagtttacggatggattgcagtcgttcgccgacgtccaatgcaggagcctcctaggattcaggctttgttgtaattgagcgttatcatggcgacagcgttcagtatttacaacacttgggcctaaatcccgggcggttgcgttcgtgcctggcgatcaagccccggaatagagccttggcacgcggcgcaggttgcagaacagctgataggggatggtctcggcggcaaccgcgacgtcactggcgaggatatgtttaccccatagctccacggtggaaccaaggccggcttgcggcacgtccgtgaggtcgatgcacagcatgtccatggacacacggcccagcaattggctgcgttgaccggccaccagcaccggcgtaccggtcggcgcgtgtcgtggatagccatcggcataacccatggcaactacaccgatacgcatgggtttcggtgtgatgaacttggcgccgtaacccaccggctcccccgccggcagttcacgcacgcagatcaccttggactccagggtcatcaccggctgcaagcgcgcagccacggcctggtcttcgccaaacggtgtagcgccgtaaagcatgatgccgggacgcacccaatcgctggacacagccggccagcccatcaccgacggcgaattgcgcaggctgacctcggccgccaagccctggcgcgccgcgtcaaacaccgccacctgttcatcgctgcgcacgcagtcgagttcatcggcacgcgcgaaatggctcatcaaaacgatcttggccactttgccgctggccagcaggcgctggtaagcctcgtggtaatccttcggatgcaggccgacacggtgcatgcccgaatcgagcttgagccagacagtcagcggcttgctcagtacggcctgttcgatggcctccagttgccacagcgaatgcaccacgcaccagaaatcatgctcgatgatcagcggcagctcgtccgcctcgaagaaaccttccagcaacagcacgggtgcacgaataccggcggcgcgcagctccaatgcctcctcgatgcaggccacggcaaacccgtccgcctcggcttccaacgcttgggcgacgcgcacggcaccatgcccgtaggcatcggccttgatcacggcaagggccttggcccccgtgacttcacgggccaattggtagttgtggcgcagggcttggaggtcgatcagggcacgggcaggacgcatggcggcaggcttctaggcggcaaagtgaagaaaaaccggcaccgacagacagcatcggcaccgggagagggatcggtgattaaggcagcgcggccacaacggacagctccaccaggatttgcggttcgcacagcttggcttcaaccgtggcacgggccggggcgacacccttgggcagccacttgtcccacaccgcgttcatgccggcgaaatccgcgtcgatgtctttcaggtagatcgtcaccgacagcagcttgctcttgtcggtgccggccaggtcgagcaaacgctcgatattggccagggtttcacgggtttgctgttcaatcccggcgttcatgtcgtcaccgacttgccccgccagatacacggtaccgctgtggacaacgatctggctcatgcgctcattggtgagctggcgctggattgacatgttgtgcggactcctggtggttgccataacgggaaatatcgaggccttcggcactgatctgcggggttttcttcgccatcaggtcggccagcaaacgaccggaaccacacgccatggtccaaccgagggtgccgtggccggtattcaggaacaggttcttgaacggggtggcaccgacaatcggagtgccatcgggggtggtcggacgcaggccggtccagaaactggcttcggtcaaatcgccgccctgaggataaaggtcgttgacgatcatctccagggtttcacgccgacgcgggttaagcgacaggtcaaaaccggctatttcagccatgccaccgacgcggatgcggttgtcgaaacgggtgattgcgaccttgtaggtctcgtcgagaatcgtcgaagtcggcgccatcgccgggttggtgatcggtacggtcagcgaatagcccttgagcgggtacaccggcgccttgatccccagcggcttgagcagcttcggcgagtagctgccgagggccagcacgtaacggtcggcggtctccagcgtgccgtcgatccacacgccgctgatgcgatcaccggcgtagtcgagacgctggatatcctgttcgaagcgaaattgcacgcccagttgcttgcacatgtcggccaggcgggtggtgaacatctggcagtcaccagtctggtcgttcggcaggcgcagggcgccagcgagaatatccgtgacgctggccagggccggttcgacgcgggcgataccggcgcggtcgagcagctcgaacggcacgccggactccttcaacacggcgatgtccttggccgcgccatcgagctgcgcctgggtgcggaacaactgggtagtccccaggctgcggccttcgtaggcaatgccggtctcggcgcgcagttcgtcgaggcagtcacggctgtactcggacagacgcaccatgcgctccttgttcaccgcgtaacggctggcggtgcagttgcgcagcatctgcgccatccacaggtattggtcgatgtcggcggtggccttgatcgccagcggcgcatggcgttgcagcagccacttgatagctttgagcggcacgcccggcgcggcccatggcgaggcatagcccggggacacctggccggcgttggcgaaactggtttccatggcagcggcaggctgacggtcgaccacaaccacttcaaagccggcccgcgccaaatagtaggcactggtcacaccaatgacgccgctacccaagaccagaacgcgcatttttatatcctcatcgcgggcatggccgctgacgtgtgttattcgagcaatgatgagcgcagtgtaaaaaacaattgccagtgcatttcactatataactgcctatatttggcgacaattctcggcaaaaacccttttcacagaggcgtatcccctatgcgtaccaacacccagaccaagcgggagctggacaagatcgatcgcaacatcctgcgcatcctgcaaaccgacgggcgtatttcgttcacggagctgggggaaaaggtcgggctgtcgaccacgccctgtaccgagcgcgtgcgccggctggagcgtgaagggatcatcatgggctacaacgcgcggctcaacccccagcatttgaaggggagtttgctggtatttgtcgagatcagcctggattacaagtccggcgacaccttcgaggagttccgccgcgccgtactgaaactgccccatgtgctggagtgccacctggtttctggcgacttcgactacctggtgaaggcgcggatttccgagatggcgtcgtaccgcaaattgcttggcgacatcctgctcaagctgccccatgtacgggagtccaagagctatatcgtgatggaagaggtgaaagagagcctgaacctgccgatcccggactgacctgagacactcgggtcaacatgtgggagggggcttgccccctcccacatttggactgtgtaaaaccgctaaaccaacacctgccgggtgctcgccatgtagtcgtggatctgcttttccacccgtgggtgaatcagctccaccgggcgccgtccattcgggcacggaagggtcttggtggtgccgaacaacctgcagatcaacgggcgctcgtcgtacaccgtgcagccgttggggcccaagtgcacgcagttcagctcctccatggccgcgtcctgctcagccgcagtcttacgcggcaggcgcgacatttcctcgggcgaggtggttaccggcccacagcagtcgtggcaaccggggacgcactcgaacgaaggaatctgcctgcgcagggcgctgactttctgactgttgcaactcatcgaaacacgtaccgaacggcgaataggcgtggattctgccgcaaaacgccctgcgcagacagcttcgtccgaccgctgtatcctgcgtcaaattttccaaacagggatgctccccatgactgccagcgcccggcacaccgcttcctactacgccgccagcagcgtgccgcaacctgagtacccggtgttgaccggcgaactgaccgcggatgtgtgcgtggtcggcggcggtttctcggggctgaacaccgcgctggagttggccgagcgtggattcagcgtggtgttgctggaagcgcgcaagatcgcctggggcgccagcgggcgtaacggcggccaactgattcgcggcgtcggccatggcctggaccagttcgccaacgtgatcggcaccgagggcgtacgccagatgaagctgatgggcctggaggcggtggagattgtgcgtgagcgcgtcgagcgctaccagatcccctgcgacctggcctggggctactgcgacctcgccaacaaaccccgcgacctgcacggcctggccgaagatgccgaagaactgcgcagccttggctatcgtcacgacatacgcctgctgcaagccaacgaaatgcccagcgtgattggctccgaccgctacgtgggcggcatgatcgacatgggctccggccacctgcacccgctgaacctggctctcggcgaagccgccgccgcgcagcatttgggcgtgaagctgttcgagcagtccgaagtcacgcgcatcgactacggccccgaagtcagcgtacacaccgcccaaggcaacgtgcgcgccaagactctggtgctggcctgcaatgcctacctcaatggcctcaacccgcacctcagcggcaaggtgctgcccgccggcagctacatcatcgccaccgagccgttgagcgcagcccaggccgccaacctgctgccgcagaacatggcggtgtgcgaccagcgtgtcacggtggattacttccggctgtcagccgaccgccgcctgctgttcggcggtgcctgccactattccggtcgcgaccccaaggatatcggcgcctatatgcgcccgaaaatgctgcaggtattcccccagttggccgacgtaaaaatcgatttccagtggggcggcatgatcggcatcggcgccaaccgtttgccgcagattggccgcctggccgaccaacccaacgtgtattacgcccaggcctacgctggccatggcctcaacgccacgcacctggcgggcaagttgctggccgaagccatcagcggccagcaacagggccgcttcgacctgttcgcccaggtgccgcacatcaccttccccggcggcaagcacctgcgctcgccgctgtaggcgctgggcatgctctggcaccgcctcaaagagctggtctgatcaatcgcgccagaacggtttcagcccctcgtcgcgtgcctgctcagcggtcagcccgacgtcgcgcaattgctccctggtcaggtgcaataaagccttgcgcgtgtggcgacggtgccagaacagaccccagcgactgatatcgcgcggcgccgtcgcccgctcctgcccagcctccagttcctgactgtgtaacgccagccgcacatcgctcatgccgttcattttgctgcccctcagttgcttgttgccttgagtgaccagcatgagcgcgcggccaaaaccattacagattcaaccctgccttattaaatccatacagatgctgcctttggacggctgaatcctgtattttctgcctatctgtaatggtcactcgggagcgaccgccatgaccctgtacataaacctcgccgaattgctgggtacccgcatcgaacaaggtttctatcgccccggtgatcgactgccttctgtacgggccttgagcgtggaacatggggtcagcctgagcaccgtgcagcaggcttatcggttgctggaagacaacggcctggcgatgcccaagccgaaatccggctacttcgtacccgtcggccgcgagttaccggccctgcccgaagtcggtcgtccggctcagcgccccgtggacatttcccaatgggaccaggtgctggagttgatacgcgcaacgccgcgcaaggatgtcatacagatgggtcgcggcatgccggatgtattgtcgcctaccttgaaacccctgttgcgcagcctggcgcgcgtgagtcgccgccaggatctgccgggcctgtattacgacaacatcctcggctgtatggagctgcgcgagcaaattgcgcgtctgtccctggattccggctgccaactgacggccgaggacatcgtgatcaccaccggctgccatgaggcgttgtctgccagcatccatgccatctgtgagccgggcgatatcgttgcggtggactcaccgagctttcacggcgccatgcagacgctcaagggcctgggcatgaaagccctggaaatccctaccgacccgatcaccggcatcagcctcgaagcgttggagctggcgctggaacagtggccgatcaaagtcatccagcttacccccaactgcaacaaccccctgggctacatcatgccggaggcgcgcaagcgggcgttgctcaccttggcacagcgcttcgacgtggcgatcatcgaagacgatgtctacggcgaactggccttcagctacccgcgcccgcgcaccatcaagtcgttcgacgaagatggccgtgtgctgctgtgcagctcgttttcgaaaaccctggcacccggtttgcgcattggctgggtggcaccgggccgatacctggaacgggtgctgcacatgaaatacatcagcaccggctccacagcgactcaaccgcagattgccatagccgagtttctcaaagggggccacttcgaaccgcatttgcggcggatgcgcactcaataccagcgcaatcgcgacttgatgctcgattgggtcagccgctacttcccgacgggcacccgtgccagccggccacaaggcagcttcatgctgtggatcgaactgccggaaggttttgatacgttgaagctcaaccgcgtcctcgtggaacaaggcgtgcaagtagcggtaggcagtatcttttccgcttccggcaaataccggaactgcctgcgcatgaactacgctgccaagccaaccgcgcagattgaagaggccgtgcgcaaggtcggggctgcggcgatcaagatgctggcggagacggccgactgacctttaccggaaatttgccgtcatatgccgacaaccgccctgatctggaagccgatcccttgatgattcaacggctattaccgttttgcctgttaggggccctggccctgggcggctgcgccagcgtgagcacgccgcgcgtccccagcgacgccctgcctgccgcgcaatcgtcgttcggccgctcgatccaggcccaggccgcgccctatcaggggcgctcgggctttcgcctgctgcccaacagcagcgaggcgttcatggcccgcgccgagctgatccgcaacgcccagaccagcctcgacctgcagtactacatcgtgcacgacggcatcagcacccgcatgctggtggacgaactgctcaaggccgccgaccgtggcgtgcgcgtgcgcatcctgctggacgacaccaccagcgacggcctcgaccagatcatcgccaccctcgcggcccaccccaagatcgagatccgtctgttcaacccgttgcacctggggcgcagcaccggcgtgacgcgggccatgggccgcctgttcaacctgtcgctgcaacatcgacgcatgcacaacaagctgtggctggcggacaacagcgtggctatcgtcggcggacgcaacctgggggatgagtatttcgatgccgagcccaacctgaacttcaccgatatcgacatgctcagcgtgggcccggtggccgagcaactgggtcacagtttcgaccagtactggaacagcgcgctgagcaagcctatcgatgacttcatctccaacgcgccgtccaagggcgacctcgccgccgcgcgcgtaagcctggaagcctccctggccgagtcgcgccagcagaaccacgcgttgtacaaccgcctgcgtacctacaagacccaaccgcgcatggacacctggcgccgcgagctgatctgggcctggaaccaggcgctgtgggatgcgccgagcaaggtgctggccaaggccgacccagaccctcggctgctgctcacaacccaactggcgccggagctggagggggtcaatcacgagctaatgatgatttctgcgtacttcgtgccgggacagccaggcctggtgtatctgaccgggcgcgccgatgcgggcgtgtcggtgagcctgctgaccaattccctggaagccaccgatgtgcccgccgtacacggcggttacgccccctaccgcaaggcgctgctggagcatggggtgaagctctacgagctgcgccgccaacccggggatggcggcggcagtggcccgcacctgtttcgccgaggcactttccggggctcggattccagcctgcacagcaaggcgatcatctttgatcgggagaaatcctttatcggctcgttcaacttcgacccacgctcggtgctgtggaacaccgaagtcggtgtgctggtcgacagccccgagctggcggaacatgtacgcaacctggcactgcaaggcatggcgcccgccctgagctatgaagcgaaattgcaggacggccaggtcgtgtgggtgaccgaagataacggccagttgcacaccctgacccgcgagcccgggagctggtggcgacggttcaatgcgtggtttgccaccagtgttggccttgagcgcatgctctaggccgcttgtgccgcaccgaatgcgccctggcgcagcagcaacatcaccaggccaagcgcaccggccgccatcagcagcggcagcgcatgcccgctgatccactggctacccgcccctgccaccaatgggccgatcaggcagccgataccccacagctgcgccacgtgggcattggcgcgcaccagcgcgtcgtcgcggtaacgctcgccgatcaagatcaacgacagggtgaacaagccgccagcacttgcgccgaacacgacccagatcggccagatcattggcgtgtgcatcaataacggaatcgccaggctcgacaccagcaacagcagcgcacaccccaggaacaacgtgcgccgcggcaagtagtcggccagtgcaccgatgggcaattgcagtaatgcgtcgccaaccaccaccgtgctgaccatggccaaggcgatctcggcggtgaacccttgttgcaggcagtacaccggcaacaacgtcaggatcatcgcctcgaacgcagcgaacagcgccaccgcccaggcaatcgctggcaggctccggcagaagcgccacagttgcgcgaacgtcacgctgaaggattcggcgctcggtgcaccggaacgtcccagcagcaacagcggcgcaaccatcaacaggccgacacccacccagaaaccgtagtcatgatcggtgccgatcaagcctaacagtaacggacccgacagctggctcaaggcatagctgcagccgtacagcgccaccagccggccgcgccactgctccacaaccaactggttgatccaactctcgccgaggataaacacgatggtcaggatcacgccgatcatcaggcgcagcaccagccacaccgggtagctgggcaggatcgccagcaggccgatggacaccgcgcccgcccacaggcacaggcgcataaggttggcggtgccaagccatgaggccaggcgactggaaaccttcgcgccgagcaatacgccaaaggccggcatcgctgccatcacgccaatcgcgaaactgccgtagccccagctttccaggcgcaaggacaccagcggcatgctgacgcccagggccaggccgacgctgagcaccgaggccaggacggcgaaataagtcgcccaacgcatttccacgctcctgtggatcatttttaagttcacacaaaccagtgtgggagggggcttgcccccgattgcggtgggtcagtgagcaccgctggcgcctgacacactgctatcggggggcaagccccctcccacatttaacctgcggtgctgcttagagcttgatccaggtcgccttcaactcggtgtatttgtcgaacgcatgcagcgacttgtcacgaccgttgcccgactgcttgaagccaccaaacggtgcggtcatgtcgccgccatcgtattggttgacccacacgctaccggcgcgcagggccttggcggtcaggtgcgccttggagatgtccgccgtccacactgccgcggccaggccgtagatggtgtcgttagcaatggcgacagcctcttcggcgctgtcgaaggtgatcaccgacaggactgggccgaagatttcttccttggcgatcttcatcgcattggtcacgccatcgaaaattgtcggctcaacataggtgccgccggtttcttccagggtgcgcttgccgccggcgaccaacttggcgccgtcggcatggccggcttcgatgtacgagagcactgtgttcatctgctgggtgtccaccagtgcaccgacgttggtcgcagggtccagcgggttgcctggtttccagcccttgagggcctcgatcaccagcggcaggaatttgtccttgatggagcgctccaccagcaggcgggaaccggcggtgcagacctcgccctggttgaaggcgatggcgccggcggcagactcggcagcggcttgcaggtccggagcatcggcgaacacgatgttcgggctcttgccgcccgcttccagccagacacgcttcatgttcgattcgccagagcggatcaacagttgcttggcaatcttggtggagccggtgaacaccagggtgtcgacgtccatgtgcagcgccagcgcgttgcccacggtatggccgtagcctggcagtacgttgaatacaccttgtggaataccggcttcaacggccagtgccgcgatgcggatggcggtcagcggggatttttcggacggcttgaggatcaccgagttaccggtggacagcgcaggccccagcttccagcaggccatcatcaacgggaagttccacggcacgatggcgccgacaacacccacgggctcacgggtcaccaggcccaattggtcgtgcggggtcgcggcgacttcgtcgtaaatcttgtcgatggcctcgccgctccagctcagggcattcgccgcgccgggtacgtcgatgttcagggagtcgctgatcggcttgcccatgtccagggtttcgagcagcgccagttcttcggcattggccttgagcaacgcagcaaaacggatcatggcggatttgcgcttggccggcgccaggcgcgaccacacgccggaattgaaggtggcgcgggcgttttcaacggcgcgttgggcgtcggcggcgtcacagctggcaacagtggccagcaggcgaccatcgaccgggctgatgcattcgaaggtgtcaccggaaacagcggcggtgtactcgccattgatgtaggcgcggccttcgatcttcagatccttggcacgttgttcccagtcggcacgggtcagggtggtcatgcgagtgtcctcctcttattgaatacaagggccacgggatatcccacagcagccttaaagaattcttgcccgccagccaatggttcggcgcaaggcagctgccaccctaaaccagcggctgggggtgtttcaatatatttgacataacgccggcaaacgcccttgcgatgttcattttaataaacatagactttgggctctccaaccgcaggccagacgggacacgcacatgagcatccaggacatcgtcgacttcagccaagccaagaccgccgccgagcgctaccgccctgccgccgagaaaatcctcaagggcgatcccgagcaaacgatctacaaccactacaacagcccctgcggccagatgagcgcgggcgtgtgggaaggtgaagtcgggcagtggacggtcaattacaccgagcatgaatactgcgaaattgtgcagggcgtgtccgtgctgcgtgatgccgacggcaacgccaagaccttgcgcgctggcgaccgcttcgtgattcccgccggtttcagcggcacctgggaagtgctggaggcgtgccgcaagatttacgtggtgtttgaacagaaggcctgatcaagacggcgggacgcggagcgtccgaggcgtcgttcccacgcagagcgtgggaacgatcaggcaaaaaaaagcccggatcgtgagatacgggctttttttcacaaggaggaaaatcaattacttgattttgccttctttgtagatcacgtgcttgcgaacgcgcgggtcgaacattttcttttcgagcttgtccggggtagtacgcttgttcttgtcggtagtgtagaagtgaccagtaccggcgctagagatcattcgaatcaattcacgcatgatatagctccttagattgtgccagcgcggcgcaattcagccagcacgacagtgatgccacgcttgtcgatgatgcgcatgcctttggcagatacgcgcagacggacgaaacgtttctcttcttcaacccagaagcggtgatgctgcaggttcggcaggaaacgacgacgggttttgttatttgcgtgggaaatgttattcccagtcaccggacccttaccggtaacttgacagactctcgacatgcctcagccctctaaaaccacatgcccaacccggcatgggttggccgcttaatctctcagtcatttggcgccaggcgccgcgtttctttagggtcttaccggctacacctacaagcgaaggaaccgggcccctagaaaagagcgctgctttataccagaaagaccccagtgcaacaacagcccgcgtgtttttactggcgtaaatcttggcggcagacgcctgaaccgttgccaggaggggccgctgtcacagccgaccgctcgtcgcacagaatgatttacagcgcgcgcgggcacagtgaagtgcacgacgaaacgcactgaggcgccatcaaaacagcatttggcgcaaaagcacaggcaaaaatgggctagtcatttacctatcagaccactacggtaggacttttccagactgcactcgcagatgggccttcgatctgcaaaggaaaccgaacatgcgcctcgctgccctaccgctattgctagcccctctctttatcgccccgctggcctctgccgccagcaccttgagcgtctgcaccgaggccagcccagaagggttcgatgtggtgcaatacaactcgctgaccaccaccaatgcctcggccgacgtgctgatgaaccgcctggtggactacgacgcgaccagcggcaagctggtgcccagcctggcggacagctgggacgtctcgccggatggcctgacctataccttcaagctgcacccggatgtgaaattccatcgcaccgagtacttcaccccaagccgcaccctgaccgccgaagacgtgcgtttcagcttcgagcgcatgctcgacccggccaacccctggcacaagatcgcccagagcggcttccctcacgcccagtcgctgcaactaccgacgctggtaaaaaagatcgacgctctcgacccactgaccgtacgtttcaccctggatcacgccgactccaccttcctcgccgcgctgagcatgggcttcgcgtcgatctacccggccgaatatgccgacaaactgctcaaggccggcacgccggagaaactcaacagccagccgatcggcactggaccgtttatcttcagccgtttccagaaagatgccgtggtgcgctacaaggccaacccggactacttcgccggtaaaccggctgtggataacttgatcttcgccatcacgccggacgccaacgtacgcctgcagaaactgcaccgcgacgagtgccagatagccctgtcgcccaagccgctggacgtgggtgaggccgaaaaggacccggcgctcaaggtggagaagaccgctgccttcatgaccgccttcgtggccatcaacagccagcacccgcccctggacaagcccgaagtccgccaggcgatcaacctggcgttcgacaaggggagctacctcaaggccgtgtttgaaggcaccgccgaggccgccaacggcccgtacccacccaacacctggagctacgccaaggacctgccgggttatccacaggacctcgccaaggccaaggcgctgctcgaccgcgccgggctcaaggacggcttcaagaccactctctggacccgccccaccggcagcctgctgaaccccaacccgaaccttggcgcacaactgctgcaggctgacctggccaaggtcggcatccaggccgagatccgcgtgatcgaatggggcgaactgatccgtcgcgccaaagccggcgaacacgacctgctcttcatgggctgggccggtgacaacggcgacccggataacttcctgaccccgcagttttcctgcgcggcggtgaaatcgggcaccaacttcgcccgctactgcgacccggcgctggacaagctgatcagcgcaggcaagaccaccagcgagcaaggcgtgcgcagcaagctgtaccaacaggcccaggcgcagatccagcaacaggcactgtggctgccactggcccacccgactgcatttgcgctggcccgcaaaaatgtcgtgggttatcaggtgagcccgttcggacgtcaggatttctcgaaggtcagcgtccagccctgagctgaaagctgcaagcccgcttgaggcttgcagctgctcccctcctacatccacccgtattccgccatcgacaacggatcgccatcccccacgataatgtgatccagcacccgcacgtccaccacttccagcgccttctgcagcaacttggtcaattttcgatcagcggcgctcggctccaggctcccggaaggatggttatggcacaggatcaacgccgccgcgttgtaggccaaagcgcgcttgaccacctgccggggatacaccatcgccgcgtcgatggtgccttgggacaacgcctcgaagcccagcaccctgtgccttgaatcaaggaacaggcagccgaagatctcatgaggctcatgacgcagcatggccttcaggtagtcccgcacggccaccgggctttccagcaccgagtcgcttcgcaggcgctcggccatgtgccgcttggccatttccagcaccgcctgtaactgggcaaacttcgccggccccaggcccaattgttggttgaacaatgtttggctggcctccagcaacgggcgcaatccaccgaattgcgccaaaagatggcgcgccaggtccaccgcgctcctgccggaaaccccggtacgcaggaagatcgccagcaactcggcatccgacaggctcgccgcgccccactccaaaagcttttcccgcggccgctctgccgccggccaatcacgaatactcatccctcctccctctccctgtatgccatgcgtatcgctgttgcctcgcggacgctgtgttatcgtaggccctcttttttgcaggcgatttcccctggggagggggcatcgcaggcgtcattgaactggcaacactgaactggaaaggcaaaccaatgcagcgtctgtatcggaaacgcatcgttctcggcgttggcggcggcattgccgcctacaagagcgcagagctggtccgcaggctcctggaccagggcgccgaagtgcgcgtggtcatgacgcgcggtggcagtgaattcatcaccccgctgaccatgcaggccttgtccgggcacccggttcacctggacctgctggaccctgcggccgaagccgccatgggtcacatcgagctggccaaatgggccgatctggtgctgatcgccccggccaccgccgacctgatcgcgcgcctggcccaaggcatcgccgatgacctgctgaccactctggtactcgccaccgacgccaccgtcgccatcgccccggccatgaaccaggccatgtggcgcgaccctgctacccaggccaacacccaacttctgcaaagccgaggcctcaaggtgttcggcccggcatccggcagccaggcctgcggcgacgttggcatgggccgcatgctcgaagccacagacctggcgctgtgcgccgccgagtgcttccagcacctggccctcaccggcaagcacgtgttgatcaccgccggcccgacccaggaaaacatcgacccggtgcgctacatcaccaaccatagctcaggaaaaatgggctttgccctggccgaagcggcggtcgaggcaggcgcacgcgtcaccctgatcaccggcccggtgcatttgccgaccccggatcgggtcacgcgaatcgacgtcgtcagcgcccgcgacatgctggcggcctgtgaggcagccattccgtgcgacctgttcatcgcctcggcggcggttgcggactaccgcccggaagtcgttgccccgcaaaagctcaagaaagaccctacgagcggagacggcctgctcctgcaaatggtgcgcaacccggacatcctggccaccatcgccacgcgcccggaccgtcctttcagcgtcggtttcgccgccgagaccgagcatttgctggactacgccgcacgcaaattgaaagacaagaacctcgacctgatcgttgccaatgatgtcgccaacccgagcatcggcttcaacagcgaggaaaacgcctgcagcgtgatcgaccgcgacctgcacgccacccttttcgcccagaccagcaagggcaagattgcccgccaactgatctcttttatcgcccaacggctgaaccaggtttaatttccatgcacgctttgcaagccaagatcctcgacccacgcatcggcagcgaattcccactgccggcctacgccaccccgggctccgcaggcctcgacctgcgcgccatgctcaagcaagacaccgtccttgaaccgggccagaccatcctgatccccaccgggctgtcgatctacgtgggtgaccctggcctggcggcgctgatcctgccgcgctcgggcctgggccacaaacatggcatcgtgctgggcaacctggtcggcctgatcgactcggactaccagggcgagttgatggtgtcgtgctggaaccgtggccagaccgcgttcaacatcgccgtcggcgagcgcattgcccagttggtattggtgccggtggtgcaggcgcacttcgaactggtcgaggagttcgatgaaacccaacgcggcgcaggcggttttgggcattccggcagccattgattgttcctacgcgcgtgcctcggtgctgccgttatgcttttaaggaacatgacggggattgcgctttatgacgaacgattcgcgaataaaacggcaccatgccgctggtcacgcctccatcacccataacagcttgaaacccgggctgttactggcggcaaccagcgtgatcgccgccggtgcgctgttctggtttggcgcgtgggtgccactgcacaacgaataccgccagcacgttgcgcaatccgccgctgcgattatcagcaagtccgtcgcaacggccgccgataaactcgcactgcaagccgagatcaacgccaaaaccccggcactcgcgaacgctgtccggtccaatcgaccggatatccggcaggccgcagaacaccatctacccgcacgggaggggttgaccagcacttggctcaccccccttcgccaagcgcccctgggcgatagcctgccgcctcaggtgctggacatgattggtcgcgcggagcgtaacgtgccgccaataccggaaatttacaaaagtggcgaccgttggcttttctatagcgtaattgccttgcgcgaagccacgcacgccccgatcatcggcaccctgacccaggcatacgacctccagccattgaccgaacaactggcgtcgctgcccccagaggtgggaacctttcgtttgtcccagcgcgtctggaacgatcccgagcaggtgatcttcacccagggccacagcgcgtcaccagacacctacacgcttgccgtaggcgataatcatctatcattgagcttcagccccggggcgctgtatcagttcgcttacccccgtcagcagcttgtgttgatggcgttggccgcgctacttgccctggtgggtgccatggcaggcgtatacctgtgcttcaggcggtcccaaatgttaatcaacaacggctgtggaataggtacagccccacgccacgaactctcctcccaaaatgccgtccaagccccaggcatgaccccactggtcagtccccaggatctttcaagacaggagcccccccaagccatgagcaatccagcccgtgtagccccgatcttccccgacagtatcttccgcgcttatgacatccgtggcgtggtgcccaaaaccctgaccgccgaaaccgcctactggattggccgggccattggcgcccagagcctggcccaggacgagcccaacgtgtcggtcggccgtgacggtcgcctgtccggcccggagttggtggaacaactgatccagggcctggccgacagcggttgccatgtgagcgacgtgggcctggtgccgacgccggcactgtactacgcagccaacgtactggctggcaagtccggggtgatgctcaccggcagccacaacccgtcggactacaacggtttcaagatcgtcatcgccggcgacacgctggccaacgaacagatccaggccctgcacgaccgcctgaaaaacaacgacctgaccagcggcaagggcaccgtcaccaaagtcgacatcctgcaacgctactctgatgaaatcaccggtgacgtcaaactcgcgcgccgcctcaaggtggtggtggattgcggcaacggcgcggcgggcgtgatcgccccgcagttgcttgaagcgctgaattgcgaagtgatcccgctgttctgcgaggtcgacggcaacttccccaaccaccacccggatccaggcaagccggagaacctggtggacctgatcgccaaggtcaaggaaaccggcgctgacgtgggcctggcctttgacggtgacggcgaccgagtgggcgtggtgactgaaaccggcgagatcgtgttcccggaccgcctgttgatgctgtttgcccgtgacgtggtggcgcgcaatgccaacgccgagatcatcttcgacgtgaagtgcactcgccgtctcaccccgctgatcaaggaatatggcggtcgcccgctaatgtggaagaccggtcactcgttgatcaaaaagaaaatgaaggaaaccggcgccctgttggccggcgaaatgagcggccacgtgttcttcaaggagcgctggttcggctttgacgacggtatttacagcgccgcgcggttgctggagatcctcagcaaggaaaaatctaccgcagaagagctgttccagaccttcccgaacgatatttctacgccagagatcaatatccatgtgaccgaggagagcaaattcagcatcattgacgcactgcacgatgcgcaatggggcgaaggcgccaacctgaccaccattgatggtgtgcgagtcgattacgccaaaggctggggcctggttcgcgcgtccaacaccacaccggtgctggtcctgcgtttcgaggcggataccgaggctgagttgcagcgcatcaaggacgtgttccacgcccagttgaaacgtgttgcccctgatctccaattaccgttctgattttttaccggagccctgaatgaccctcgaacgcgaagccgctgccaacactgccaaggtcctgtccgaagcgttgccttacatccgacgctatgtcggcaagacgctggtgatcaagtacggcggcaatgccatggaaagcgacgagctgaaaaccggctttgcccgcgacatcgtgttgatgaaagccgtggggatcaacccggtggtggtgcacggcggcggcccgcaaatcggcgacctgctcaagcgcctgtcgatcgagagtcacttcatcgatggcatgcgcgtcactgacgcgcagaccatggacgtggtggagatggtcctcggcggccaggtcaacaaagacatcgtcaacttgatcaaccgccacggcggcagcgccatcggcctgaccggcaaggacgcggagttgatccgcgcgaaaaagctgacggtgacccgtcagacaccggagatgacccagccggaaatcatcgacatcggccaggtgggcgaagtggttggcgtgaacaccgacctgctgaacctgctggtcaagggcgacttcatcccggtgatcgcgccgatcggcgtgggcgccaatggcgagtcctacaacatcaacgccgacctggtggccggcaaggtggccgaagcactgaaggctgaaaagctgatgctgctgaccaacatcgccggcctgatggacaagcaaggcaaagtcctgaccggcctgaccacccaacaagtggacgatctgatcgctgacggcactatctacggcggcatgctgcccaagatccgctgcgcgctggaagcggtgcaaggcggggtgggcagctcgttgatcatcgatggtcgagtgccgaatgcggtactgctggagatcttcacggataccggcatgggtacgttgatcagtaaccgcaaacggccttaagacaccagaaaacaaaaggccccgttcaatctgattgagcggggccttttttgtgcttgaacacactgtagatccaaatgtgggagggggctttcccccgattagcggtgtatcagccaaataactgcaactgacactccgtcatcgggggcaagccccctcccacactagcctttacacacaagggagctcggggtcagacgccaaactgctcgcgatatgcacgcaccgccggcagatgctgcttgagctgcggatcatcttccaggaactgcaacacctggttcaacgagacgatgctcacgactggaatgccgaaatcgcgctccacttcctggatggccgacaactcaccgttgccacgctcctggcggttcagcgcgatcagcacgccggcggccttggcgccgtcctgggaagcaatgatctgcatcacttcgcgaatagcggtgccggcggtgatcacgtcatcgatgatcagcacatcgcccttgagtggagcgccgaccaggctgccgccttcaccgtgggccttggcctctttacggttgaagcaccaaggcaggtcctgcccgtgatgctcagccagcgccacggcggtcgccgccgccaggggaatacccttgtaggccgggccaaacagcacatcgaaggaaataccgctctcaacgatggcagccgcatagaaacgacccagctgagccagggccgaacccgagttgaacagacccgcattgaagaagtacgggctggtgcgtcctgacttgagggtgaactcaccgaagcgcaaaaccccgcgatcgatggcaaaacgaatgaaatcgcgttgatacgcctgcatgaaaaaagcctcagataccacggatttagctaattaggtagacggcgtgtatcatacacgcacgcgatttttggggccatttatgcggatcatcagtgtgaacgttaatggtattcaggctgcagtcgagcgtggtttgctcagttggctgcaagcccagaatgccgacgtcatctgcctgcaggatacccgcgcctccgcctttgaactggacgacccagccttccaactggatggctacttcctttatgcctgcgatgccgaagtgcccacccaaggtggcgtagctttgtattcgcggttgcaacccaaggcggtcatcagcggcctcggcttcgagacagccgaccgctacgggcgctacctgcaagccgatttcgacaaggtcagcatcgcgaccttgctgcttccttcggggcagaacggcgatgaagacttgaaccagaagttcaagctaatggacgatttcgcccgttacctggataaacagcgacgcaaacgtcgcgagtacatttattgtggctcgctgtacgtggcgcaacagaagctggatatcaagaactggcgcgacagccagcaatccccgggcttcctggcgccggaacgggcctggatggacgagattgtcggcaacatgggctatgtggatgccctgcgcgaagtcagccgcgaaggcgaccagtacagctggtggccggacaacgaacaggctgagatgctcaacctgggctggcgcttcgactaccagttgctgaccccgggtctgcgccggttcgttcgcagcgcacgcctgccgcgccagccgcgcttctcgcagcacgcgccgctgatcgtggactacgactggacactgaccatctgaggtcttttcccaggcacaaaaaaaccgacatcgctgtcggtttttttgtgggtgctcattatttgatcacacgccaggtcaagggatagcggtaggcgatccccttgttggccttgatgctgccaatgatggtcagcaccaccgtggcgatcgccagggcgaacatcaggaaaaaaccaatcaccgcgaaagccagcaccatgcaagcgatccaggcgatggcgacggtgatctggaagttcagggcttccttgccctgatcatcaatgaacgagtccacttctttcttcatctgccataggatcagtggccccacgacgctgccgaaggggaacacaaaccccagaaaagccgcgagatgacacaacatcgcgccctggcgcacttcgtaggaaggtgtcggcaccggcatttggctgttgtcattcatggcgattctccttgagacgggctcagtcagccagggcggcgttctgcagttcgaagatctcggtcatgcctttctgggccagggccagcatcgcgttcagttcggccggctggaatggcgcgccttcggcggtgccctgcacttcgatgaaaccaccggtgctggtcatcaccacgttcaggtcggtctcggcagccgagtcttccaggtagtccaggtccagcactggctcgccctggtacatgcccaccgaaacagcggcgatcatttgcttgagcgggtcaccgcccttgaggccgccacgcttcttgatcactttcagcgcgtcaaccagggccaccatggcaccggtgatggacgcagtgcgggtgccaccgtcggcctggatcacgtcgcaatcgacgtacagggtcacgtcgcccagcttggacatgtccagggctgcgcgcagggaacgaccgatcaggcgctggatttccagggtgcggccgccttgcttgccacggctggcttcacgctggttacgctcgccggtggcgcgcggcaacatgccgtactctgcggtcagccaaccctggccctggcctttaagaaagcgcggtacgccgttttcgacgctgacggtgcagatcaccttggtatcgccaaactcgaccagtacggatccctcggcgtgtttggtgtagttgcgggtgatgcggatcgagcggagctgatcggcagcgcgaccacttggacgtttcataggggatacctgtactgaggacgaaaaactgccgagcattatagagccgcgggccgattcggggcactgctaaaaaatccggttacgaatgcccgggtttgggcgcactcgccccactgcgctacaatcctgcgccttcccaatcatcagcccgcatttacgggactgcaacgcgaggtacctccatggtgcacagcatgaccgcctttgcccgcgtcgaaaaagccggcgtacaaggcaccctgagctgggaactgcgctcggtcaacagccgctacctggagccgcatctgcgcctgccggagtcgttccgcgacctcgaaggcgctgtgcgtgaagcgctgcgccagggcatttcccgtggcaagctggaatgcaccctgcgctttaccgaagaaaccaccggcaagccgctgcaggttgaccgcgaccgcgccgcgcaattggtcgccgccgccgaaaccatcgccggcctgatcaagcagccggccgcgctcaaccccctggaagtgctggcctggcccggtgtgctggtggccgacgccaccgacccgcaagcgctcaacgccgaagccctcgccctgttcaatcagggtttgaaggagctcaaggccggccgcgagcgtgaaggcgccgagttggcccgcctgatcagcgagcgcctgacctcgatcgaagaagacgtggtcaccctgcgcgagctggtcccgcagatgcttgccgcccagcgccagaaggtcctcgaccgcttcaccgacatgaaggccgacctcgacccggtgcgcctggagcaggaaatggtactgctggcgcaaaagagcgatgtggccgaagaactggaccgcctgagcacccacatcctcgaagtacgccgcgtgctcaagtccggcggcgccgccggtcggcgcctggacttcctgatgcaggaactcaaccgcgaagccaatacactgggctccaaggctttcgatccgcgcagcaccacggctgcggtcaacctcaaggtgttgatcgagcagatgcgcgaacaagtacagaatattgagtaaggcaacctccatgacccacagcaccggcaccctttacatcatttccgctccttcgggcgcgggcaagagcagcctggtcaaggccctgaccgacgctgacgagcagatccgcatctcggtctcccacaccacccgcgccatgcgcccgggcgaggtgaacggggtgcactatcacttcgtcgagcgcaccgagttcgtcaagatgatcgaacacggcgacttcctggagcgcgccgaagtgttcggcaacctctatggtacttcgcaaagccacttgcagcagaccctggacgaaggccacgacttgatcctggaaatcgactggcagggtgccgaacaagtgcgccagctgatgcccaaggcgcgttcgatctttatcctgccgccgtcgcttgaagcgttgcaccagcgcctgaccaaccgcggccaggacagtgacgagatcatcgaaggccgcatgcgtgaagccgtcagcgaaatgagccactacgtcgactacgactacttgatcatcaacgacgatttttcccacgcactggatgatctgaaggcgattttccgcaccaatcagctccagcaaaagcgtcagcaacagcgttttggcaaattgctggccgaactgctcggttgattggctcttcccaaaaccgctgcaagggctttacattggcacttgtagcggttttgcgagggcctgcgaaaaatcagcgcttccctaaacgctggtgattttttaaactgtttagtccgctcgcccaaccgggcagcgcgcatcttgcattcgctccgaggaataccatggcccgcgtaaccgttgaagactgcctagaacacgtggataaccgctttgagctggtcatgctctctaccaagcgtgcccgtcaactggccactggcggcaaagagcccctggtccagtgggaaaacgacaagcctaccgttgtcgccctgcgtgaaatcgctgaaggcctgatgagctacgagttcatcgccaacgccgaaatcgttgaagacgaaccgctgtttgcagcgttcgaggacgagtccaacgaggccgtctaagcctatgcctggtcgacgtagcacggcgcggggtcacagccaacggcaggagttcacactttgccgagcatagacgccctcgccgatcgcttatcggcctacctcggcccagaccaggtcaacctggtccgccgagcgtatttctacgccgaacaagcccacgacggccaacgccgccgcagcggagaggcgtatgtcacccatcctcttgcggtggccaacattcttgccgacatgcacatggaccatcagagcctgatggccgcgatgctgcatgacgtgatcgaagacaccggcatcgccaaggaagcgctcagcgcgcaattcggcgaaaccgtggccgaactggtcgacggggtcagcaaactgacccagatgaacttcgagaccaaggccgaggcccaggcggaaaacttccagaagatggccatggccatggcccgcgatatccgcgtgatcctggtcaagctggccgaccggctgcacaacatgcgtacgctggaagtgctctccggcgaaaaacgccggcgcatcgccaaggaaaccctggaaatctacgcgcccatcgccaaccggctgggcatgcatgccattcgtatcgagttcgaagacctcggtttcaaggccatgcacccgatgcgttcggcacgcatctaccaggcggtcaagcgcgcccgtggcaaccgcaaggaaatcgtcaacaagatcgaagaatccctgagccattgcctggcgatcgacgagatcgagggcgaagtcagcggccgacaaaagcacatctacggcatctacaagaagatgcgcggcaagcgccgggccttcaacgagatcatggacgtgtacgcgttccggatcatcgtcgacaaggtcgacacctgttatcgcgtactgggcgctgtacataacttgtacaaacccctgccgggtcgcttcaaggattacatcgcgattcccaaggccaacggctaccagtcgctgcataccacgctgttcggtatgcacggggtgccgatcgagatccagattcgcacccgcgaaatggaagagatggccaacaacggcatcgccgcccattggctgtacaagtccagcggcgacgagcagcccaaaggcactcatgcgcgcgcccgccagtgggtcaagggcgtgctggaaatgcagcaacgcgccggcaactccctggaatttatcgaaagcgtgaagatcgacctgttcccggacgaggtctacgtgtttacgcccaaaggccggatcatggagctgcccaagggctccaccgccgtcgactttgcctatgcagtgcacaccgatgtgggcaacagctgcatcgcctgtcggatcaatcgtcgtctcgcaccgctgtccgaaccgctgcaaagtggctccacggtcgagatcgtcagtgctccaggcgcacggccgaacccggcgtggctcaacttcgtggtcaccggcaaggcgcgcacgcacatccgtcacgcgctgaaattgcagcgccgctccgagtccatcagcctgggcgaacgcctgctgaacaaggtgctcaacggtttcgacagcgctctcgacaagatcccgcaggaacgcgtacaagcgatgctccacgagtaccgtcaggaaaccatcgaagacctgctggaagatatcggcctgggcaaccgcatggcctatgtagtcgcccgccgcctgctcggcgaaggcgaacagctgccaagccccgaaggcccgctggcgattcgcggcaccgagggcctggtgctcagctacgccaagtgctgcacgccgatcccaggcgatccgattgtcggccacttgtccgcaggcaaaggcatggtggtgcacctggacaactgccgcaacatcaccgaaatccgccacaacccggaaaaatgcatccagctctcgtgggccaaggatgtcaccggcgaattcaacgtcgagttgcgcgtggagctggaacaccagcgtggcctgatcgccctgctcgccagcagcgtcaacgcagccgacggcaatatcgagaaaatcagcatggacgagcgcgatggccgcatcagcgtggtccaactggtggtcagcgtccacgaccgcgtgcacctggcccgcgtgatcaagaaactgcgtgccttgaccggtgtgatccgcatcactcgcatgcgcgcctaacccacattacaaggagtcattcatgaccaagaccgttatcaccagcgataaagcccctgccgccatcggcacttactcccaggcgatcaaggcgggcaacaccgtctacatgtccggccagatcccgctggacccaaagaccatggaactggtggaaggcttcgaagcacagaccgtacaggtcttcgaaaacctcaagtccgttgctgaagccgccggcggttcgttcaaggacatcgtcaagctgaacatcttcctcaccgacctgagccacttcgccaaggtcaacgagatcatgggcaagtacttcgaacagccgtacccagcccgcgccgccatcggcgttgccgccctgccaaagggtgcacaggttgagatggacgcgatcctggtcatcgagtaaaacacccggcgcagcccccacaggctgcgccgacttcgtttcagaaggatttcatgatgcgcaaagcgcttgtagcctcatcaatgctcgccctgttgctcggcggctgtgccagtaaccctgccgacagggatgtgagcggcacctggatcaaccaggtagccatcgatgcggctgccaagggcggccctttgcgtgaagccttgcagagctttggcccgaacctcgagtgggaggtcaataccaaggccgcgcaggcccgctactacaacggttttgaagtagcggaaggcaagttgctgggtgaacagtccggcgcctggagcgtggatttctacggcagctccgccaccgaactcaagcgcaaaggcaagcaactgctgcaagtggccaatgacaacgagcctgaacagctgtttgcccgcgccaaagaccccgccccggaaggcgcacctttgggcgccaacttcgagcgggcgctgtacgcggcctacctgggcggtgactggaagatcagcgacggcttcggcagcggcgccatcgtgcagttccaggctgacggcaaagtcgccggcctgcctaatgttgaccggtactcgctatgcctggccggtgattgcgcgtcaatgagcggcggctacgacagcatctggctgcaactcaatggccagggcaacccgtggatctttgtgcgcaagggcaagcaactggagattttccaggcggtgaataccgcgcaggccgacgaggtgccctcatttacgccggggcctcggcagtggctactggaaaaacagtgatacaaagcaaaggagcccaagggctcctttttctttagcctgcaccgcgattggcacgactgaagacattgccccatgcgcacactccttatcctcggcctcttgctgctgagcggctgcatccctgcagatatcagtggtgtctggatcaatcagccaatcattgatgtggccgcgcaaggcaaaccgctgaacatccacggtacgcatttggagtggcacatcgacactcgtgctggcaaggcacaggtgcgtaacggctttgagatgagcgaaggccagttactgctcaaatcccccaacgcctggatcgtcgactacggtggcggtcacaccgatgagctgcaatttgatggcaagtatctgacccaggcgaccaaccaatacgccccacaggaagtgttcagccgcccaaccgaaacggtggagacaggggataattgggtcaacaccttcgtgaaagccctgaacacagcgtacatggccggcgaatggaacatcatcgacggccccgggaaaggcacgacggcgatgttcaccgcgcagggtcgcgtttcagggcttgggcaagcagatcgatacacactgtgcctggacggcgactgccgatcccagggtgcgggcaatgaaaccctgctcttaggccatgcaggcaccgacgatacatggatcttcgtgcgcaaaggcaagcaacttgagattttccaggcggtgaataccgcgcaggccgacgaagcaccgcagttcacccccggcccccgccaatggctgctggaaaaacaatagccgccatgccgcaaatccaaatgtgggagggggcttgcccccgatggcagtgcatcagctaatacaactgtggctgacactccgctatcgggggcaagccccctcccacattttttgactgcgtttcagcccttgaggatcgccgcatagccttcgcgataagtcgggtaggtcggcgtccagcccaacgctttcgcccgggcattgctgcactgcttgctgcccgctcgccgcacactggcgtcctcagcccactcggtcaccccaaggtattcgcgcaaccagcccaccacttcggccagtggcgctggcgcatcgtcgacaccgatgtagaccttgtccagcgaaccgccctcttccacatggcgcaataaaaaggccagcagccccgcagcgtcttccgcatgaatgcgattgccatataaaggtggatcgattgcgactcggtagccctggcggacctgggtcagcaaccattcgcgtcccggaccataaatgccggtcaggcgcacgatgctggccgggatgccgctattgagcgccacctgctcagcctccagcatcacctgcccggaataccccttcgcctgagtctccgatgtttcgtcgacccactcgccattctgctgcccgtagacgctgctgctggatacaaacagcaggtgcttgggctcctggccgtagtcgcccaaccactcaagcacatgtttcagcccttctacataagcggcgcgatagccggcttcgtcgtggtccgtcgcagcggcgcagtacaccaggtaatccaccccgccaatcggccaggtgtctgggcaatccttcttgaacaagtcaccggcaatgccgatcacgccctcaggaagccgcgaaatatcgcggcgcaggccatgaacctcccattccgaggcgagcaactggctagccagccgactacccacatcgccacatccggcaatcacaacagaaggcgctgacatcacaaaactccgcgaagaaaggtctaggttagccttcgcagatgacagacggccagaaaaagcacaaataaagttactgtattacttctgttaacaagaattacttgcaataataaccgcccatttgtcctcgcccccagggtctggaaggacgatcactcatttttttactcaggtccggccagcatgacacgtaatacaacccccgcttcgccaaccaagcttcacagcccatcccgcgcctggcgcgcgattgctgcgctgctgttcagcgtactgctggcaccgaccgccgccttcgctgatgccaccgcgccagccaccccggcggccgccgagcacaacactgcggcaccggcagcaccggcagcacctgccgtagcgcccgctgccaccgacccggcccaggctgctgaccctgccgccgacgacagcggtgtggtgctggaagaagacaacaccctgggcatggcccacgacctgtcgccctggggcatgtaccagaacgctgacgtggtggtgaaagccgtgatgatcggcctggccatcgcctcgatcatcacctggaccatctggatcgccaaaggcttcgagctgctgggcgccaagcgtcgcctgcgcaccgaaatcgtccacctgaaaaaggccaccaccctcaaggaagccagcgaaagcgcgaccaaaaagggcaccctggccaataccctggtgcacgacgcgttggaagaaatgcgcctgtcggccaacacccgcgaaaaagaaggcatcaaggaacgtgtggccttccgcctggagcgtctggtggcggcctgcggccgtaacatgagcagcggcaccggcgtgctggcgaccatcggttccaccgcgccgttcgtcggcctgttcggtaccgtgtggggcatcatgaacagcttcatcggcatcgccaaaacccagaccaccaacctcgccgttgttgccccaggcatcgccgaagccctgctggccaccgccctgggcctggttgccgcgattcctgcggtggtgatctacaacgtcttcgcgcgttcgattgccggctataaggcccaggtatcggacgcgtcggcggaagtcctgctgctggtcagccgcgacctcgatcacctgcctaccgagcgcagctcgcaaccgcacatggtgaaagtggggtaatcggccatgggcctgcatttgaatcaaggcgacgacgaactcgtcgagaaccacgaaatcaacgtcacgccgtttatcgacgtgatgctggtgctgctgatcatcttcatggtggcagcaccgttggccaccgtggacatcaaggtcgacctgcccgcgtccagcgccaagccggcgccacggccggagaaaccgatcttcctcagcgtcaaggcggaccaacgcctgttcctgggcgaagaagaggtcaaggctgaaaccctggggccggtgctcgacgccaagacccagggcaagaaggacacgacgatcttcttccaggctgacaagggcgtggactacggcgacctgatgagcgtgatggatgccctgcgggcagccggctacctcaaggtaggcctggtcggacttgagacggcagccaagaaatgatcacgacgcgccacaaactgacgcgttatggcaccagcctcgccgtcgtactgggcgtgcatgccgtcgcgatcgctatcgcgcttcattggtcggcgccgcgcacggtgcagttgccaccggctgccatggtcatcgacctggcaccgatgccagccccaccgccgccggcaccgcccaaggtggtcacgccgccgcaaccgcctgccccggtggaagaactgccgctgccgaaactggccgaggcacccaagccgacgatccaggtgcccaagccggtcaagcccaagcccaaaccgcagccgcccaagcctgtggagaagaagatcgagccgcccaaggagaaaccttccgaggacccgccgagcgatgctccgccgacccaggcaccggctgaaaaatcggcccagcccgttcctggcccgtcgccgcaacagatcgccgccaaggcgtcctgggaaggcaccctgctggcccacctgcagaagtacaagaagtacccgccaggcgcccaggcgcgtggcaaggaaggcctcaaccgcttgaagttcgtggtggatgccgagggtaacgtgctgtcctacgagttggtgggccgctccggcaacgccgacctggaccgcgccacgctggacatgatccgtcgtgcccagccgctgcccaagccaccggcagacatgctcaagggtggcagcatcgagatcgttgcaccgttcgtgtacaacatcgaaaaacgtcgtcgctgagccgctcccaatgggcaccctcgggtgcccattgcgctccccctccccggtatttcaagccttgcaaacccgcgagctgaaccgttactgaacgtgaaaccaatgtcatggttcttcacttgtaacacttcaatacaccaccaatcatgcgcgaataattctcatttgagaggcttttcgccatgtcctgccctccccgcctgacgcttgccctgctcgcaatcgctggcgccccctgcgcagcccatgcggatcaactggtcagcctgaccgtgcaaaaccacaccttcacacccgccagcttcaccgtgccggctggggagcgctttcgcatccagctcaccaacaacgacgacaccgtcgacgaattcgaaagctacgacatgaaattcgaaaagatcgtcgtgcccggcaacaccattaccgtcttcgccggcccgatgcatccgggcacctacagctttttcgacgactaccaccccgaccaggccaaaggcaccgtcaccgtcgtcgcggccaaggagtaagtcatgctggcctgtctgctgatcgtgtttcgtgaagtcctggaagccggcatcgtcatcggtatcgtcatggccgccacccaggggctggcgcggcgcagtgcctacatcatcggcggcatcgctgccggtgttggcggcgcggcgatcctcgcgctgttcactggcgccatcacccaggccctggacggtttcggccaggaaatcttcaacgccaccatccttatcgtcgcggtgtgcatgctcggctggcacaacctgtggatgagtagccatggccgcgaactcgctactcaactgcgcgaaagcggggcggcggtgcaacgcggcgaaaagaccctgtgggcactggccatcgtgatcaccgtggccgtgctgcgcgaaggctcggaaatcgtgctgttcctgtatggcatcgccgcctccacccacaccgaacccctgacgatgttcatcggcggcgtgctcgggattgccggcggcggcgtgctgtcgtggctgctgtatcgcgggctggtggtgatcagcctcaagcgcctgttctcggtcaccacctggatgatcgccgtactcgcggcgggaatggccggccgcgccgccgcgatcctggccggtatcaacctgatcccggcctggggctacgagttgtgggacacctcttggctagtctccgacgcaagcctcaccggtagggcgctgcaagcgctgactggctacaccgaccgccccctgggcgttcaactgtttgcctgggtggccacccttaccctgctgctactgggtagccgccttgtgcagtcgcgcaccactcaaccgtcttcatccaccctggagcgtcacccatgaaccacctgtccaaacccgtggccgctgcgctggtcctgaccagtgccctggctttttccgccgtcagccaagcccgtgaatacccgatcggcgggccggttcagacccacgacatggagatcgcctcctcgtacctcaccgggatcgagatggcgccaatgccaccaggcatggtcatggacaaggactcggtgcaccttgaaaccgatgtgcatgccaccgccgacaacaagtacggactgtccaacggtgaatgggtgccttacctgagcatctcctattccctggtcaaggaaggcgctccggactacaaacaaatcggcacgctcctgccgatggttgccaaagacggcgcccactatgcgaacaacgtgaagatggacggccccggcacctataccgtggtcctgcgctatgagagcccgcagatcaatggcttcttccaccacgtcgacaaagaaaccggcgtccccgaatggtggggcccgttcaccgagaccttcaccttcaaatacccgcagaaataaccggcaaaacacctgcggcacccgattagctggtgtcgcaaaccccatcgtgtctgataacgtgcgtctatcgattgcagccggtatgcttggcccgcaacctcatggacgcccgctatgactcttacagaattgcgctacatcgtcaccctcgcccaagagcagcacttcggccacgcggccgagcgttgccatgtcagccaaccgacgctgtcggtgggcgtgaaaaagcttgaagacgaactcggtgtgctgattttcgagcgcagcaagagcgccgtgcgcctcaccccggtgggcgaaggcatcgtggcccaggcccagaaggtgctggagcaggcgcagagcattcgcgaactggcccaggccggcaagaaccagctgaccgcgccgctcaaggtcggcgccatctacaccgtcggcccgtacctgtttccgcacctgatcccgcaactgcaccgcgtcgcgccgcagatgccgctgtatatcgaagaaaatttcacccacgtgttgcgtgacaaactgcgcaacggcgagctggacgcgatcatcatcgccctgccgttcaatgaagccgacgtgctgaccctgccgctctacgacgagccgttctacgtgctgatgccggcctcgcacccgtggacccagaaagacaccatcgacgccggcctgctcaacgacaagagcctgctgttgctcggtgaagggcactgcttccgcgaccaggtcctcgaagcctgcccgaccctgaccaagggcaatgacggcgccaagcacaccaccgtggaatccagctccctggaaaccatccgccacatggtcgcgtccggcctgggcatttccatcctgccgctgtcagcggtggacagccatcactacgcccccggcgtgatcgaagtgcgccccctcacgccgccggtgccgttccgcaccgtggcgatcgcctggcgcgccagcttcccacggcccaaagcgattgagatcctcgccgactcgatccgcctgtgttcggtcgccaagccgactgccgcgagctaagccagggtatgactgagctgtcgcaggtgtcggtgacggcactcaagggtgtcggtgaagccatggccgagaagctggccaaggtgggcctggagaacctccaggacgtgctgttccatctgcccctgcgctatcaggaccgcacccgcgtagtgcccatcggccagttgcgccccgggcaggacgcagtggtcgaaggcaccgtcagcggtgccgatgtggtgatgggcaagcgccgcagtctggtcgtacgcctgcaggatggcactggcggcctgagcctgcgcttctaccatttcagcaacgcgcagaaggaaggcctcaagcgcggcacccgcgtgcgctgctacggcgaagcgcgacccggcgcatccggccttgagatctatcacccggaataccgcgccattaccggtgacgaaccgccgccggtcgacaccacgctcacgccgatctacccgctcaccgaaggcctgacccagcaacgcctgcgccaactgtgcatgcagacgctgaccatgctcggtccgaaaagcctgcctgattggctgccccaggaactggcccgcgactatcaactggcgccgctggacgatgcaatccgctacctgcatcacccgcccgccgacgccgatgtcgacgaactcgcactcggtcatcactgggcccagcaccgtctggcctttgaagaactgctgacccaccaattgtcgcagcaacgcctgcgcgaaagcatgcgctccctgcgtgcaccggcaatgcccaaggccacgcgcctgcccgcgcagtacctggccaacctcggttttgcgccgaccggtgcccagcaacgcgtcggcaatgaaatcgcctatgacctgagccagcaagagcccatgctgcggctgatccagggcgatgtgggcgcaggcaagaccgtggtcgccgccctcgccgccctgcaagcactggaagccggctaccaggtggcgctgatggcgcccaccgagatcctcgccgagcagcacttcatcaccttcaagcgctggctcgaaccgctgggcctggaagtcgcgtggctggccggcaagctcaagggcaagaaccgcgcggcggcactggaacagatcgctggcggcgccccgatggtggtgggcacccacgcgctgttccaggacgaagtgcagttcaagaacctggcgctggtgatcatcgacgaacagcaccgcttcggcgtgcaacagcgcctggccctgcgccagaaaggcgtgggcgggcggatgaacccgcaccagttgatcatgaccgccacaccgattccgcgcaccctggccatgagcgcctacgccgacctcgacacctcgatcctcgacgaactgccgcctggccgtacgccggtcaacaccgtgctggtcaccgacacccggcgcgtggaagtgatcgaacgcgtacgcggcgcctgtgccgaagggcgccaggcgtactgggtgtgcacgctgatcgaagagtccgaagagctgacctgccaagcggccgaaaccacttacgaagacctcaccagcgccctcggcgaactcaaggtcgggctgatccacgggcgtatgaaaccggctgaaaaggccgcagtgatggccgagttcaaggccggcaacctgcaactgctggtcgccaccacggtgattgaagtgggcgtggacgtgcccaacgccagcctgatgatcatcgaaaaccccgagcgcctgggcctggcgcaactgcaccagttgcgtggccgtgtgggccgaggcagcgccgccagccactgcgtgctgctctaccacccgccgctgtcacagatcggccgccagcgcctgggcatcatgcgtgaaaccaacgacggttttgtcatcgccgaaaaagacctggaactgcgcggccccggcgaaatgctcggcacccgtcagaccggcctgctgcaattcaaagtcgccgacctgatgcgcgacgccgacctgctgccagccgtgcgcgatgcggcgcaggcgctgctggagcgctggccggatcacgtcagcccgctgctcaatcgctggctcaggcatgggcagcaatacggccaagtgtgacgcctgacgcacttaagcgaccaacagttgtatcaagctggttatacttcgtggactgtaagaaattggatcaggccatgtcagaagttgccctcgccacagccccactgaccgccccgccggtcattcgggctctgctcgccaaactcgtcatcccctacacggaagtcgccgacctcccgggcctgaatcctgcgcagaaggtccaggcggtgctgttggaagacgcggtgggcgccctgatggtgctgtttccgcagaaccagttgctcgacctcaaccgccttgccgaactcaccggtcgtcgcctgaccgctgtgtcgccggatcgcgtcaagcgcatgctcgacaaacatgacctgagcctgctgcctggtctgccaccccttaccagttcgccctgcctgtacgaaggcagcctgctcaacgagccgagcctgctggtgcattcgggtgaagccgggctgctgctcgacattgacaccaacgccttcaagaccctgctcaccaaggccagcgccgggcacttcggcgagccgctgagcaatatccgccccaacctcgaccgccccaatgacgaccgcgaggaaatcacccaggcgatgcaggcgttcaccgcccgccgtatccagcaacgcctggaagcgaccatcgagattccaccgctggccgataccgcacagaagatcatcaagctgcgcgtcgacccaaacgccaccatcgatgacatcaccggcgtggtcgagaccgacccggccctggccgcccaagtggtgagctgggcagcgtcgccgtactacgcctcgccgggcaagattcgttcagtggaagacgccatcgtgcgtgtgctgggcttcgacctagtgatcaacctggcgctgggcctggccctgggcaagaccctgagcctgcccaaggaccacccgcaccagtcgacgccgtactggcaccagtcgatctacaccgccgccgtgatcgaaggcctgacccgcgccatgccccgcgcccagcgcccggaagccggcctgacctacctcgccggcttgctgcacaacttcggctacctgttgctggcccacgtgttcccgccgcacttctcgctgatctgccgccacctggaggtcaacccgcacctgtgccacagctatgtcgagcaacacctgctgggcattagccgcgagcagatcggcgcctggctgatgcgctactgggacatgccggacgaactgtccaccgccctgcgcttccagcacgacccgacctacgatgggcaatacgccgagtacccgaacctggtgtgcctggccgtgcgcctgttgcgtagccgcggaatcggctccgggccggacgaggcgattccggatgcgctgctcgagcgcctgggcttgagccgtgacaaggctgaagaggtggtgggcaaagtgcttgatgctgaagtgctgttgcgcgaattggcgtcgcagttcagccagggctaaatcgatagcctgtcagaccgctatcggggggcaagccccctcccacacttgaaatgcattcccctgtgggagggggcttgcccccgatgaatccacctcggtctacttctttttcttcggcttcaaatacttggtcaacccctggaaccagatcaccagcgccgggttgcccttgatctggatcgacttgtcctgaatccccgtcatgaacgccaattgcttgttcttcgcctgcatcgtggcgaagccgtaggcggcatctttgaacgcaatggcaaacgccggcgccgggtgcacacccgagcggctggtgatgcgctggtctttgacgatgaagtgacgggcaaccttgccgtcgagggtctgcagctggaacgccaggtctttatcgcccaactgttgctggaaggcaggattggtgcggctggctttgcccatcatcaagcccaacacccacaggagaagacggaatttcatgactacgcagcctcgttgaattaaacagcaggcgcagtttatcgattcccgcctagaacaccaacgaagtttcgtagcactaagaggtagacattcgctgcaggcctaatgaccaagcagtcacatcttaaacgctcgaccgacattcaaagacatgatgatttatcctgttttttgaactagcgcatattcaaaatcattctaaataactgtcaaaactcacagttatgccacaaccaaacacgccatagagtttaccaagacgtcaatcaaacaccattgattacgcgaacaaacttgaggtgtccctcgtgaaagcatttgccaactgcccaaaattcattcgtaacggccctacaacgccaaacagcacaggctacctgaaaaccgacatttcaatgttgccccttcccccgtttaatacgttcaaagccaccaaagacttgaccatgcggtttaatggagatcatctcgaagtcgttgcaaccgttgatatgtatccccacttgcgcttctacatttacatacacaaagaggacttacacaatgaagggacgttaccgatagatccctctggtctccccggcacagcctatgcgggttttattgccgataagctatacgacggaaccaaaggggaactttcgttctgctaccacggccgagaaggacgactcgatgccacgctgcactttgaggcagccccctatgggttcagcgatggagtcgttgaggtaacaggtctggaacctcccgttaaatagagttaaccagcctacgtagaacgccagtcagtaaaaccagctgacgttctacggttgaccacagcgtcttacttaaacattagggcaaggaaccggcgcccagtcggccaggttcggatcgcggcagctaccttcgagctgagctttgccggcgctggcgacctgcttgctttcagcctgcttggcctgcacggtctggatgctcttctcggtggtgacggcttctttcggcacgactggcagagccggctttttcgcaaccttgaccggcttcttgcccttggccggagcggccacaggtgcggtgtcggcggtcgccacggtcactacgtcattacgctgcacgcccacctgttgcaggtctttctcgtaagcctgggtgtagttgttcaggtcttcgctggccttgccgttgaccgcaacgatcaggtcattggactccttcaggcccgccacgatttccgccaggcgcttgcggccttcggtgtcgttgacggtcttggccttgcggtcggccaccagcttggtgaacgcgctctggtagcactgttgcgatgccttggcgtaggcggtgctgcgatcgatgtcggaggcgcttttgttgaagtcggtggagtacgacgcgatgcgctggttgtcatcggcgatctgcttctgacgctcggtgtagtaacccgccgcgccgccggccagggcgccgcccgctgcgccgatggcggcgttacggccacgcttgtcggagtcgccggtcagcgcaccgagcaatgcaccaccggcagcgccgatggccgcgccggtcacgaccgacttggtcatgttcgagtcggtggcgcgcaagtgctgcaccggctcgtagcagttggggtagtactcgaccttggtgctcgacgcgaccttggaggccggcgacgtggcgcaaccggtcagcacagtgctgaaaccggccgcgatcagcagcaagtgacgcttggaaaccgccttacgggaaaaaagcataggtgtgttctcttttaagtttgacttgcccagcacggccaccgccgcctgagtcccttccaagctcgctatacagccagcgctcatcgctgaccgctcgctgcgagcaattccttcaagatcgttgccgggtcggcccgctgttgcttgcggtagttgccgacatggcgaacgaacagtgttgcgcgcgtcaccaggctcttgccgagcaccggcttgcgatccaactcttccttgatccgttgaaactgcgcctggatcaccgcatcggtgtaacgcgtgccggtggccaggttgtcgatatagatcgccaccgcgccatcgagggcgctgcggccattggcaatggccatgtcgaacagttgcgcgctggccgcgtccttgttgtccagggcctgctggcgactcttctgcaggttggccaggcggatgttgtagttggcgatggtctcggccaccagcgcggccgactgaatcaggttgcccgccgcttcttcgcgctgctgggcgatcagcgagacgttgcgcttgagctcttcattgaccagccccagttcggcttgcagcttggggtcgacgctggcggcgatgatgctgtccaggcgcttggtcgggtcctgggcgtcgtcgatggcatcagtcagcgcggccaggcggccctctttctgccactgggcgaacagctccttgtagcgtgaacgcggtgccgacagcgcaccgatcgccacgcggaaaccggtggtctcgttgctctgctcggtgccatctgcggcgaacagtgggtattcgcggcgcatgccggtgaacagcgtgccctcgccttccaggtagttgccgcctttgaccacaaagccaccgtaggtgccctggcgacgcccggcgtggaccagttggaacgattcctggaccatttccgcggcgttgccgatcacgtcgaacagaccgatggggttgggcaatttggtgccgatgggcatcaggcgcgcagcctgcccggtgccgcccgccacctggttgaacaccgcgtagtcgccgagcgggccgtcgctgtcgctgccttcgacacggcgcgggaacaggcgcccttccaggtcctggcggctcacggcgtgaccgccgcgtgcggcaaattcccactccacttcggtagggaggcgcacaaagcccaggccgccatcatccgccgaggagccacgaccactcaccggcagcaagtctcggtggtatttcatcaaccaggcgctgtacaccgccgagaagcgttcagcctcaaagcgcgacagtttcaccttgggtaagcgcccggccatgccggtcggtacatcgcacgccggtgcaggctcgccgctggccagcgactgcgcctgggacatcacctgggcgtactggcgtgcggtcacttcgtacttgccgatgaagtacagcatgggcttgagtggggtcttggcgtcggtcttcggcatcaagggcgcgatgactttgttccagtccttgggcaggtccttgagggtgaactggccgttgatgaagtcgcggcggtagccggaaataaacgattgctggtaacccgcctcgccttcggcaaaggggtagccgaggctgatctcgcggtcatccagggtgccttgggccagcacgtaggcgtagcggaacagcatgttgccttcgcagggcagcggtaggctgacatcgccttccaacggcttggggttgtcgagcttgtcactcgcctcatcggcccaggccatcgaggccagggtcagcgccatacaggcgcccagtaacttatacatctctgattccttcagaagcctggacccgcgccactcgccaaccaccacacgccgccgccacggcgctgacgccgaggactgcgaccagggccaggccgtaatggcgcgccagcaggtggctggcgaattcgcccggcacctgcacgaataattcattcaagcccgcctcggccagcccatacagcccggcactgagtacggcagcaaaacccgcgctgtacagcgcctgtaccaccacgaacaacagcagcccaccggtggaaaaccccagcaggcgcaacaccgacaactcccgccgcttgcgcgccacagcggccagggcgccggcaaaaatcgccgcaaacgcccccgccaacgccaacccgcagatcacccagaacacgatcgacaggttgcggctcaacgactgcacctgcgcgatggtctgcgcctgggtcgacaccaacaggttctgcccggcgaagtacacccgcagcggctccacatcggtgaggttgcgggcgtacaggcggaacgccgggtacacgcgctgctcactcacacccacggcctccccgtcccaacccaacgccggcactgcgcggccatcgcggtaatcttccgccgcttccagcaaccccaggtcggcaaacaaaccgtcacgggcaaaggcttccagcggcaacaccgccagcacctgcacccgcgtgcgctgggcttcgacgcgcccggccacttgccgtgcaaagctggtttccagccaatcgccaggccgcgccgcgagcttttcggcggcggtgtggctcagcacgatctggtccaggcccttgggcaccggcaggccggccagcagtgggtcacccgacgcggtcggcagcatctccagggccaacgtgcccacttgcgccgtcgccgcaatctgccgcgtacgcggtatggcgaacgccacctcaccgcgctcgcccagttgctcgataaatgccctgctgaatcgaccaccgcccagcggaataatttcacgggtggcggggtcggtctgcaaacgttcggtcaaactgctaaccagtccaaacttcaggccgaataacaccagcagcggcgcgatcaccgccaccagcgccagcaccgaacaggccgacagccaggcgtcattgcggtaatcctgccaggccagcgacgccaccagaccgatgcgcatcagcacacctccccgagggtggcggtgacgccgccatcggtgtcgcgacggcaactgatgcgccgcacctgcaagccactggcgcgggccaggggctcgtcatgggtggcgatcacacaggccgcacggtgttcacgggcctgggccagcaatgcctgcatcacgcgctcggcattcaacgggtcgagggacgccgtcggttcgtccgccagcaccagttgcggcgcatgggccagggcacgggcgcagctgacacgctggcgctgccccaccgacagcgccgccggcttcttggccaactggtcgctgatctccaactgctcggccaggcgcgtcacgctgccatcgtccttcaaacccagcagttgccgggacagggcgatattcccgcgcacatcaagaaagcccagcaggccgccggtttgcagcacatagcccaagtgctggctgcgcagcgcggccaggctggattgccgatcggcgcgccacagcccggcgatgtcctgttgatgaaattcaaactgccccacctgatccggcgccaacaccagcgccagcagatcgagcaaggtgcttttaccgcaaccgctgggcccgacaatcgccacttgctcacccgcacgcagcgccagcgccgggatcaccaggctatagcgctggctgccgacgccccggctcttgtgcaccgcattcaggttcagcatcacggcaacgtcgacaatggcacgcggtacaacgcgtcgcccggctcggcatcgccgaagcggacccagttggccaggtcattgtggaaggtttcgtagaggcggattttcgagtccagctcgtcgataaagtcttcctgctcggccacgctcaacgacaaccacaaatcctgggtcatgttcagcgacttgctgcggtacggcaggccttcgaggtattcgccgagaacgccgccgtcagccaggttgccgcccttgcgcagggcctgcgggtcgcggctcatgtaggccgaggcgctggcgatttcctggaagaagtctttcggtgaggtctgggtcttgcgcgccgcgtcgacgatcagtttcagcgactgctgcaggtcgttgagctgcaacttggtcagcatcacgcacacctggaacgccggcagcgccggattggtcaggtcgcggtcggcggtccaggcgctgaccagctgcggcgcctggctcgcggttttgcgaccgaggaaatccatgtgcatggcatagccgaccgctgcagacttgtccgccaggctcggtgcgctgttcagcaacggcaccggctgcggcgtgttgctgcgcacctggtgcaccaggttggcgaacaccgtgccgatctcatccacccgctcgccgagcttgcgcacatcgccaccgggcaccgccgtgtacaggtcgccaatctgtgggttggcgtcggcggtgaggatgcggtactggctctcggcgccggcgtgggttttcttgccggcgtcggtgcgcaggtgcaaggcgtagatcttgatctgcttgcccagcgcggcctggcgcacttcggcttcgttcatctgggtagcggcgaacgggtcgttcttgcgcagcgcgccggcgtcggtgacgagcaggatgatgcgcccgccataaccggaccaatccatgccgtccaccgcctgcatcaccccggcgaacgcatcttcgttgaaggagtggctggacacggtggatgccttgacctggcgcgccatgtcgaggaagcgttgcgggtcgcggccctgatcgaggctgatcagggtcttggccacgtattccaggcccggggttttcttgatgctgctgcgaaaaccgaccatgccgaagctgacactgtccaactcgccgcgctcggcgatgcgggtttgcagctcgtgcaccacgtcgcggatctggtcgatatagggctgcatcgacacggtggtgtccaccaccagcaccaccgccgtgcggaaggcgtcggcgttggcattcatcaccggggtcgcgggcttggctgccgcgctgctgccggggtcgatggaagccacattgagcaactgcaccggttggccgttttcgtcgaagctttctttggagtcgaagatcggcaacaggtagaactggttctgcgggacggcgctggcggcgggctccaacgccaggatctggctgttgtcttcgctgtttttctgcgccttggccagcacgcctttggcggccgaagggtcagccaggagtttttccacttcgccggattggcgcaggaacatcaccggtgcccggcccgagcgctcggtgaatttcagcaccaggctctgcttccagtcgctgacttgagacgcaggcaaccaaccgtcgctgcgcccatcggtggcggcgccgacacgcacccacgggctgccgtcgacgtccttgcgctggtacacatagagcacggaaaacgccggcagggccttgcctggcgcgctgcccgcatcggtggaaagctttgcgcccggcttgctgagcacgcgctggaacagggtcttcttgcccgccatcaacagcggacgctggccgccgtccacttcggcgaccgctggcggcggtggggtgacgttcggtacctgggcagcgggcggtttagctaccggctcgtcactgccgctcaaccaccagtaactcgcaccgccaatcgccagtgccaccgccaccgcaaccgccgccagcgccaacaccggcccacggcgctgctcgctgtgctgggtcggcggcaccaccggttggcgcaccggctggggtttctcgctgggaatctcgatggattccggggtgatgcccgccaggtcgaaactcatcggaatcggcagcggccgcaccagcgtggcttccggcgagtccgccggcaggttatccaaggcccgcaacagcgccgcggcgtccgggaaacgctcagccgggtccttggccaacagcttgcgcagcacgtcctgataacggccatggtgcaccggcagttccggcagcggttcggtcaggtgcgccagcgccgtggagagcgcatcggtgccggtgtaaggcagcttgccgaccagaatctcgtacagcaccacgcccagcgcatacaggtcggcgcggccgtcgatctcctggccccgcgcctgttccgggctcatgtagctgggggtgcccacggcaaacccggcctgggtgaattgcgtgcggtcatccagtgacttggcgatgccgaagtcggacagcaccgccgtgccatcggcgcggaacagaatgttcgccggttttacatcgcggtgcaccaggccctgggcgtgggcatagcccagcgccgaggcgatctggcggatcagcgtcacgccctgctccggcgtcatgccggcggcgatgcgctccttgagcgtgccgttgggcaggtattccatggccatgtagtacagctcaccgacattgccgatgtcatggatggtcaccgtgtgcgggtgcgacaaccgcgccagggtcttgccctcgcgcaggaagcgctcgcagaaggttggatcggccgccagcgccgccgccatcaccttcaatgccaccttgcgctccagcgagcgctgggtcgccaggtacacgctggccatggcgccttcgccgatctcgccttcgatgtcataaccggggatgacgatgttcatggcgataccttcacgacaatggcggtgatgttgtccggcgcgccccggttgagccccaggtgcacgaggctgcgcacgatttcatccggcgcgtcgtggctgagcacttcgcggatttcatggtcttcgacggttttgttcaggccatcgctgcacagcaggtaactatcgccgggggcgatcagcaggtcgaccaccgccagctccaggtgggcttccacgccaatcgcgcgggtgacgatgttggcgcgcgggtgcgtacgcgcgtcggcttcgctgagcaggccgctgtcttgcaggtcctggacgtagctgtggtcgcgggagatgccttcgagcgcgccgtcgcgcaggcggtacaagcgactgtcgccggcccacaggcacacaccgcgcaggccacgggcggccaacaccaccacggtgctgcccatcatggtcacgccacggttggcggtttcttcgcgcacggctgcgttgatgcgctgcaggtcgttgcgcaacgctgccgtgtattcatccagcgaacgccccaccggcacgctgcgcaagctgtcgacgatcaggctgctgacatagtcgcccgccgcgtgcccgcccataccgtcggccaccacccacaggcggttttccggcaggtccaggcaggcgtcttcgttgacctggcggaccatgcccacatggcttttgctcgcggatttgtacgtcgaccccatctacaccacaccttcttgtccgagcaaaaactgcgcaaaatcgctggcgacaggcaggccctgacaccgcagcaaaccaggggaaatacgttgcgaaccacgcccccaccacaggctggcgccttcgcaggcctgttcggccagggccgtcatgcgctgctgcggcacggtcgcggccacccgttgcaggccggcgaaacgactgtccacggcacgcggctcgctcgccggcaagcccaggttgtcgaggccgtggttgaaactttcaaaggtggcgccggcatccagggtgctgagcaacagttcttcggcctgctcgaaccagttgtccgggccgcccaccagagaggccggattggtgtcgtggtcgagcaacaccaccaccgccagcgggaagtagcgccccacccggtcgatgctcggcattaccacgcccgccgccgcatccggcccgcacacgcccggcgccagcacaaagcgccacagcgggctgaccaggtaagtattgagccattcaccgccgaggctgttctgactggccagcaaacccgccgccagccagctgtcccacgggccgataaagctctggggcaaggcgcggctgacaaagtcgccacggctggccaacttgccgtagaagcccagcgtcgtcatagccgctccggcaggctgaagccactgagcacgcggctcttgaacgggttgaaggcgctgttggcgcgcaactcgtaggcaatgctcgcaccgtcgacgcgcaggcgcaggttgaagcggtccggcgaattaccggcggtgaggtccgactgttccagcaagcggaaccaggcccacggcccgtccagggtcacgccggaacggccgctggcggcgggcggcatgatcgaaatgcgcaccacgccaatgctgccggggttcggccattgcatcgccaccgggcggctggggccgtggtcgtagctcagctgctggccgtccaggtccagcaggaactgggtgatggtcgggtccatcgacaccggtttgagttcgaaacgcacgatgggttgagtcccccccgcgcggaagaacgcatcgcggatcgtcgcggcacgctggaaggtctgcagcacgcccggagcaatccccagcttctgcgccgcgcccggctgccaacgccaggtctgcgcggacgtatcgacgtaaggctgcaggtatttgcggaagtagttgtccatcaccccgcccacgccgaagaattggccgaagtcatccagggtggcgtcccgtgcactgcccggcgacatcgggtagcgcccggccagggactgacgatacacgttgaccacttcgctgacccaggcggcgttcaattggttgcgcacgccgcccatcatgctgttggtggtggagttgaccaccgacttgaccatgccctgcaccagcggtggctggcgctcggcattcaggctgactcgcgtggccgcagccgccgcctggttcttcgcctcgccgagcaacgcatcgccgctggcgccgaccatggcgctgacctgcacatacagcgcgttcatgtcggtgagcaggccgtcgatggccgccggttcgccttcgttcttgctgacgatgctgttgagctgggcgaagtgcgcggtcaccgggtcctccgccgccgcaggcgcattggcagtcggttgttcctggccgagcaggctgcccaggcgctccttgagcttgtcgacgccgccttccactggcacgcccttggcggccaactggcgttcttcggcttgcaggtcggtttccttggccaccgccaccagcagttttttcagaggcgaggtcggcccggaaatcacccgcagcacatcagccgcctgggccacgctggtgatcggcacaaagtcgatgtccgccagcaacgcatcccactggcgctggtagtcctggaaatacaggcgccgcacatcggcggccaggctcaccacgttctgctggtcggcctgttcctggcccaacacccactgctcttcagcgagggtgccagtctggttcagactgctcagcaggaacgcctggcgatagcccttggcggtgaagaacccactcaacggctcgcccagcggcttgccgcttttgcggctgaacaccagcgcggcgtcacggccagcggcttcgttgaggcgaaagtccgggataccctcgggcagtttctggcgcttgacccggtcatatacgcgctgggccaccggcagttgttgcaactggcggcgcaggtcgtcgatcagccgctgatccaggcgcgcgttcggcgggtggcgttcgaacagcgactgcaagtgcccggccaatgcctggcgctgatccgccggcaggtcgcggggcaggttgcggtcccagtccagggcgatccaggccttgatgaagtccgggtcgtaatgctcggcgtcagccagcatcaggtaggccttgaggccttcgtagaggaagtcggaattgccgccgccgtgcagttgttcttcgatgcgcgtcaccaggcgtggcgcgaacaccgcgatcagcagcttgcggtagacgctggcagactcggcttcaagcatatcgccctgatacagcccgaggccttcggaccagctcggcgaatcgcccgccaggtttttcacggcgttgagcaacggcagcacggcgagcacttcgcgctgcgccgggctcaggttctgcacggcctggcccagcggcgcgaccttctggtcgacctgggcgatgtaggcctggttggcgcgataactcacccaccacaaaccgctgaccaccacgaccaacgccacagtggcggccaacacaccccgcgcaatccacttgcgccgacgctcgaccttcgggttcacccccaccaggccacgctcggcaaacgccacggcggtgaagagtttttcgatgaagtagctgcgcccggtgccgctctggcgcgccaaatgctggcggtccaggttcatgctctgggccatggcgccgatcaggcggtcaatcgggctgccttcctgggtgccgctggtgaagtacacgccgcgcagcaacacgcgctcttcaaaggcattgggtttgaacacgccttcgaggaagctttgcaaacaatccttcaaggcgccgaactgctgcgggaagccatagatcaggtcgcgccgcgccgggtcgcgttcctgttgcaggcgttcgaccaggcgctcattgaggcgctgttccagcccggcgaactcgctttgcaggtgtgccaatgggctgtcgctgtttttgccatcgtccagggcaaaggtcatgccccacacctgggcgcgctcttccttgctcaggttatcgaagaactccatgaagcccggcaccaggtcgagcttggtcagcatcaggtagatcgggaagcgcacgcccagttgggtgtacagctcctggatacgcaggcggatggcagcggcgtgggcggcgcgctcggcgtcggtgcccagcaacaggtccgacaggctgatggcaatgaacgcaccatcgatggggcgacgtgagcgctgttttttcagcaggtcgaggaagcccagccaggcggccttatcgaccgtggagttgctatcctgggtggtgtagcggccggcggtgtcgagcagcacggcttgatcggtaaaccaccagtcgcagttgcgcgtaccgccaacgccacgcaccgcaccggcgcccaactgcgccgccagcggaaaatgcagcccggagttgaccagcgcggtggtcttgcccgaacccggcgggccgatgatcacgtaccacggcaactcgtagaggttgcggcgctcatcgccaccgagcttggcctttttcagcagggccagggcctcgtccatgcgctggcgcagggtggtgagctcttcggcggtggcgacgctgttggggtcggccggggtttcggcggccaggctgcgcatcacttcagcggcctgacggcgggcctggataatgcggaacacgcggtaggccagccacaccgcgaacaccaggatgatcaacgcccagcgccggccttctggtaccagcacgtcgagcaacggcccgacaaaccagatgatcaggctcagggcgatcaaacccagcacggggatcacccagcgaatcatgaaactgaaaaacgccttcactcgacgccctccgccaatacggtgatttcaacccgacgattgcgggcacggccttcggcggtggcgttggtcgccaccggctcggtgtcgctgcgcccttcggcactgaagcgctcggcctggccggtcttggccgccaggatctccagcaccgacttggcccgcgcttcggacagcgcccagttggacgggaagcgcaacgtggcaatcgggcggttgtcgctgtgcccggtcacccgcacctggcccttgaccttgcggatggcgtcggcgatgcgcagcatcagcggctggtagtcatcgacgatgctggaactggcggacgcaaacagctcgtcgccgcgaatggtcaccacggagcggtcgaccgcatcttccactgccacgcggccggccttgatgtcttccaccaggaagccagccaggcgcggacgctcgatgactttgggctgcgccaccggacgatcgatggcctgcaccgggatctcgcccagggcatggatattcttgaacaccggctcggcatccgacgccagcttcatgcgcaagccaaacagcaacgccagtaacaacgccaagccgatggccacggcgatccacggcggcatgaattgcgccaggcggtcgcgggccacggtcacgccgcgccagtgcggcgacagctcacgctcatgctcgccacgcgcactgcgaatggctgcagcagtgcgttcgcgcagggtctccagctggctgcgaccgtcgttcatcacgcggtagcggccttcgaaccccaggcacatgcacaggtacaacagctccagcagatacagacgttcccgtgggctttgcaggcagtggtccaacagttggaagaccttttcgccgccccaggcttcgttgtgcacggtgatcagcaggctctgtttgccccagtcgctggtactgccccagggcgtgctcaataccgcttcatccagcgcggtgcacagcgcgtaacgcgccagcagcacttcgttacgggcgatgccagcggcttcggcacgctcttcgaactggcgcaggtaggccaacagctgtgcgcgcaggctggccggcgccgggtgggcgatggtgttgcgcaggcgcgtcagcagcgccagcaaagggccggcggcgctttccagcgggttgaggccgtggctcttgccggtgagcatcggcgcggccggcatggccagcggcgaaggttcggcacgcacaggttccggcgcccggccacccggacgcggcatgaactgggtgcggtcatcatcattgggatgcatcgcggattatcctcggatcgcccagaaggccaggttcaaacccgggaactgcccggcgatatggaaggcgaagccgccggaattgcccagctgttgccaggcctcgctgccgcgatccagctcgtaataggtcgaacctgcgtgatacggcaattggcgcggcgccactggcagcggcaacaggctgatgcccggcagttgcaggttgaccaggtcgcggatgtgctccaccgagccgactttgctctgctggccgaagcgtgcgcgcagggtttcgccgggcacatcggcgcgcaccaccaggatgaaactggcgttgtcgagcagggtcttgtcggccagcatcgccacgtgcacgccgtaggctttctcgacaatcgggattggcgtggccttgctgtcgatcagcatcgacagcgcttcgcgcaatgccgccatcaccggcgcgaagctcagggccaggtcgtcgtgctggtactgcgggtattcctgggggcgacggccggaggtggagaaggtcgagaactcgccggccaggctgaccagctcgctgaagaagcgctccgggtgcaacgggctcaactggctcaaatgctggaccagcggttgggcacggttgaccagttgcagcagcatgaagtcggcaatctccgacgcgccaccggcgcccgatgccaccacccgccccgccagagcttcgccgcgctggtgcagcaggccgagcagttcgctgcgaaaggcggtgagcggtttgctcgcggccacatccaataccggcgggatgtaggtgtcatcgagcaccaatgcgcggtcggcacgtttttccttgatgcgcaccaggcccacggcggcgtaatcgctgatgccatcctgggcggtgagcaggcgcagggcgcgggaacccacggccaccggggcgcggttttcgaagggtgcgttgtcatcgcgcacttcgcgcacctggctcacataacgcgcagcctccagggcttcgccttcatccacggtatcgcgggcgccggcgcgcttgagcggcagggccaggtacaccaggccgtcgcgcaggttgtcgtcgatgttcagcgggcttggtgccaggtcatcctgggggatattgaacggcgtaccgtcgggcaacaggccacgcgccgatacgatcgccagcttgccctgggccagcaggccctggtcgatcagcagctcggaaaacccccaggcgcctgcggacaacgggcggctgcgggcatcgatcaggttttccaggtaacggtcatgctgctggaagtgctgcgttccgatgaacatgccttccgaccagaccacgcgattgttccaggacatgggggctccgattgcttcttattgggcagggctggatggggtggccacgacgtcggcgcgcacagcacgcacatcgaggctgatctggtattcggtgtactggcgcgcgggcacgttgagcaccgtacgccattgcgcacgatccaactcgcgatagcccaccagcaagccgatctggcgcgtggacgggtcgaggtcgcgctggatgctcagttgctcgccgggttgcaccatcacttcgtcctggtccagcaggtccaggcccagtgtggattgcgcacggtcggccagggcgaagtaatcggagcgggcgaaggtggcggcatttttcagttcgaaaatgcgcacccgcaccggggcggcctggccgttggcgccggggttaagcccgctgatcgcatgaaagtgcagctcgacggcggccgtgtccacttcggcctcggcggctgtttcgggtttgacggcgtctttggcacacgccgtcagcagaaacacggtggcgactgcgagtaaaaacctgggaatcatcctgcgtcctcaatgacgtacttagctatccgttaaatccatgtgctgcggttcagcgtcgctgtcgtgcgctgtgttcttcgtaggctcggctgaattcgcggccgaacaggtcctggaaatcttcctgggcctcgcgggaaatattgctgtagagctcggtgaactgctgccagtactgggcctggcgcgaaccattgaaaaggctcgacagcccgccgggcttgcccatgcgttcttccagttgggccggctcgaagcgactgagcaggtgcttgatcgccgcttccacgccggccatcaccgccaactggtgggcacgcaggtcgttgaaactgtcgcgcacggcgaggtcgggtgccataaacgcctggttgccgtggcgcaggagcagcagtaacgcttcgtcggcattcggggcgaatttcaacggattgttttctgccggctggatcatggtctgctgcatgcgaaactcgcccttgaggctggcacgggcccgcagcacgtcgatcaggccttcgaccatcaggcggtagctgcggccgatgttttccatctgggcctcggcctgggctttgtccaggcgcagttgatccaggcccgcgccgcgcaggaaggcttgcagcaggtccggttgctggctgtcggccacggggggcgggggctcgaccacggggggcggctggatgaccggtggcggcgcaggtggcggcgcagcgctgacgacgggtgctggcgtgtcgccaaacaggtcccagtcttcgggaatcaccgcgcccgacaccaccggcggtgccactaccggcgcagccactggcgtcggcggacggaagtcatgttgctcggaaggcacgtggtccggcacggtcggtggcggtacggcggtggggctgaggaagtcgaacaggtccggcagcgtgtccatcgatgaagcgccctggaactgcggcgcgatcacaggggtggaaacaggcacgggcttattcgacacggcacccatcagcgcttcgaaactgttcggcgcctcgccggcaaacggctggctgtcgacggcctgtacgttgaaatcgatacgcgcctggatctcgtaatcgccgatgcggatcagctcgccatcctgcaacagctcgctgttacctctacgcaaacgaataccggcgttaaccaactccacgccgttggtactgttatcggttaaataataacggccatctttgtattgaataacgcagtgctgcgaggagaccagacgctcaggatcaggcaatacccagtcattatccgagctgcggccgatagccatcgagccctgattcatggacttttcggagcactgcccaggggtaatcttgtgataactagtgatagtcaaacacagcgacatcttgcctccttgctgatacttcgcgcgcggtcgattcccgggacagcgcttcccgggatatccccatcaggtcgagcaatcgaccgtccaaaacctgccaataccagcatgatcgctgatcttaactgggctctatgacaaaaatcctgtcccggtacgtcgttcgacccactagtcgcgcaggttgttaagcaccgcacatctgtcacagagggcgaatagcttaccttgacaaggcataagtactacaccaaaaatgcacaacttcttgaataccagtgatggcacattagtggcgtcttgcttatatgaccaagaaaacatgcaaagttccttgcgcaactaatgcatgaattgcccgccatctaacgggctgatagggagatcaaattcagtggatgtgccgttgctgctcaccgccgtttccgcgacttcgccctgtggcgaagacatggaatatgacgcgcaatttctgcaattggagcgtgatgccaagggccaacccgagcgcagcatgggcgactcgatcctgcccgctgaaccgccggaatggcgcagcatccagcagcaaagcctcgacttgctcgcgcgcagcaaagacctgcgcatcacccatttcctgctgcaaagcgccctcgccctccaaggcgtggccggcctggccgaagcgctgacgctgatcgatgcgttgctgcgtgattactggtccgacctgcacccgcgcctggacgccgacgacgctaacgaccccaccgtacgcatcaacgccctcaccggcctgacctgcgacaccaacatccgcctgctgcgcgaaagcatcctcacgcgctcgcgcaccttcggccccgtgagcctgcgcgccgcgctcaacgccagtggcctgttgagcttccccgatgaacaactcggcgcgcagcagctcaacgcggcgttcctcgacagcgaccccgagcagctacaggccacccgcgacgcgctgatcgcggcgcgtgcggcgtgcgaagccatcgaacaacaggtcaacgatcaggtcggttccgcccagggcgtggacctcagtgccttgaagcaaccgctcaagcaggcgttgcagatactcaaccaagcggtgcccggcgccgccggcagcagcgaacccgaggccgtcagtgacgacaatgccccctcggccgacttcgccgccgcccccgcagcaccgcgtcccgttggcgatatcgccagccgcgacgatgtgctgcgcagcctcgacaagatccttgcgtactacacccggcacgagccttcgagcccgctgccggtactgttgaaccgggcaaagaatctggtgcatgccgactttgcggccatcgtgcgcaatctgattcccgacggcatgtcccaatttgaaaacctgcgcgggccggacggcgagtaagccatccgactgtgcagtaacaacaccgtcgctcaagcgaccaggagcagcaacgtggcgaagcaaagttctcagaaattcatcgcgcgcaaccgtgcgcctcgagtgcagatcgagtacgacgtcgagctctacggcgccgagaaaaaggtccagctgcccttcgtaatgggcgtgatggccgacctcgccggcaagcctgccgagccgttggcgccggtggccgaccgcaagttccttgaagtggacgtcgacaacttcgactcgcgcctcaaggccatgcagccgcgcgtggctttccacgtccccaacgagctgaccggcgaaggcaacctgagcctggacatcaccttcgaaagcatggacgacttcagcccggccgccgtggcccgcaaggtcgactcgctgaaccaactgctcgaagcccgcacccagctggccaacctgctgacctacatggacggcaagactggcgctgaagaaatcatcatgaaggcgatcaaggacccggcactgctgcaagcacttgccagcgcgcctaagcctgcaggggaccagtaatcatgactgacaataccgcccgcgaaggctcccagatcctgggcacccagaccgaagaagccagcgagttcgccaacctgctgctgcaagagttcaagcccaagaccgagcgcgcccgcgaagccgtggaaactgccgtgcgcaccctggccgaacaggccctggcgcaaaccgacctggtgtccaatgacgcgatcaagtcgatcgaatcgatcatcgctgccatcgacgccaagctgaccgcccaggtcaaccagatcatccaccacccggatttccaacagctggaaagcgcctggcgtggcctgcactacctggtcaacaacaccgagagcgatgagcagctcaagatccgcgtgctcaacatctccaagccggacctgcacaagaccctgaagaaattcaagggcaccgcatgggaccagagcccgatcttcaagaagatgtacgaagaagaatacggccagttcggcggcgaaccctacggctgcctggtgggcgactactacttcgaccagtcgccacccgacgtggaactgctgggcgagctgtccaaagtctgcgccgccatgcactccccgttcatcgctgcggcctcgccgaccgtgatgggcatgggctcgtggcaagagctgtcgaacccgcgcgacctgaccaagatcttcaccaccccggaatacgccggctggcgttcgctgcgtgaatcggaagactcgcgctacatcggcctgaccatgccgcgcttcctggcgcgcctgccgtacggtgccaagaccgacccggtggaggccttcgccttcgaagaaaacaccgacggtgccgacagttccaagtacacctgggccaacgccgcgtacgcgatggcggtgaacatcaaccgctcgttcaagcactacggctggtgctcgcgcatccgtggcatcgagtctggcggcgaagtggaaaacctaccggcccacacgttcccgaccgatgacggtggcgtggacatgaagtgcccgaccgaaatcgccatcagcgaccgtcgtgaggcggagctggcgaagaacggtttcatgccgctgctgcacaagaaaaataccgacttcgccgcgttcattggcgcgcagtcgttgcagaaaccggccgaatacgatgacccggacgccaccgccaacgccaacctggccgcgcgcctgccgtacctgttcgccacctgccgtttcgctcactacttgaagtgcatcgtgcgcgacaagatcggttccttcaaagagaaggacgagatgcagcgctggttgcaggactggatcctcaactacgtggacggtgacccggcgcactccaccgaaaccaccaaggcccagcacccattggctgccgccgaagtgatcgtggaagaagtcgaaggcaacccggggtactacaactccaagttctacctgcgcccgcactaccagctcgaagggctgaccgtgtcgctgcgcctggtatcgaagctgccttcggcgaaaagcgcgtaaaccaccgatgagctagctcttctgtgggagggggcttgcccccgatggcatcaccggggtgtaactgacacaccgaggtgcctgcatcgggggcaagccccctcccacacaaaagcactgcccatttggagttaatcaaattcagtggcccacgccacacagggagaaaacatggctgttgatattttcatcaagatcggcgacatcaagggcgagtccatggacaaggcccacaaggacgaaatcgacgtgctgaactggagctggggcatggcccagtccggcaacatgcacgtgggcggcggtggcggcgcgggcaaggtgaatatccaggacctgtcgctgaccaaatacgtcgacaaggcttcgccgaacctgatgatgcactgcgccagcggcaagcacatcgacaaggtcaagctgaccgtgcgcaaggccggtggcgaaagccaggtcgagtacatggtgatcaacctggaggaagtgctggtcacctcgctgagcaccggcggttcgggcaccgatgaccgcttgaccgagaacgtgaccctgaacttcgcccaagtgatggtcgactaccagccgcagaaagccgacggcaccaaagacggcggcgcgatcaagtttggctggaacatccgttccaacaccaagcgctgatagcctttatggccgtggcatcgcgccacggccatacgtcctctgtccctctcgcaacccgtccgtggagctgctttggtgatcactgaaatcgcttcccgcgaccgtctgcaaccgtccctgttggaccggctgacggacgacgatccaaccaaccccaaggaaagcgccgacaaacgcgtgctgtccctgacccaattgaaagcctcggtactgcgtgacctggcgtggctgctcaacaccacgtcgttgctcgatgccgatgccacgctgcacaccccggccggcacctcggtggtcaattacggcctgccggcgctggcgggcaacagtgtttccagcgtggatatcaaggcgctggaagccctgatctaccaggccatcgccacctttgagccgcgcattctgcgccacaccctgcgtgtcaaagcccgtgtcggccatggcgagatgaaccacaacgccctgagtttcgagatcgaaggcgacctgtgggcccagccggtgccgttgcgcctgttgctgcaaaccgacctcgacctggaatccggccacgtacgcgtggtgaatgccgaccagcggaggcgcccatgaacccgcgcctgctggagctgtacaaccaggaactgcaccacgtgcgcgaaagcgccgcggagttcgccaaggaatacccgaagatcgccagtcggctgaccctgtccggtatggactgcgccgacccgtacgtcgaacgcttgctcgaaggctttgcctacctcacggcccgcgtgcagctcaagctcgacgccgagtacccgaccttcacccacaacctgttggaaatcgcctacccgcactacctggcaccgacaccgtcgatgacggtggtgcagttgcagaccgacccggacgaaggctcgctggccagtggtttcccgctgcctcgcgacaccgtattgcgcgctgcgctgggccgcgaaacccagacctgctgcgagtaccgcaccgcgcacccggtgacgttgtggccgttgcaggtgagcaacgccgagtacttcggcaaccccgccgctgtgttgggccgcctggccgccagcgagccgaaagccaaggccggcctgcgcctgaccctgcgcaccggtgccgagctgccgttcaacagcctcgacctggataatctgccgctgtacctcagtggcgccgacgagcaacccttccgcctctacgagcaactgctgggcaacgcctgcgcggtgtttgcgcgcaagccgggtggcgattgggtcgagcgcctgccccaggacgcgttgcgctcccgaggcttcgacgacgccgacgcggccatgccggtggtggcgcgggccttccagggctatcgcctgctgcaggaatacttcgccctgccccaccgcttcctgttcgtcgagttcgccgagctgagccgtgcggtcaagcgttgtgacggccaggagctggaactgattgtgctgttcgaccgccacgaaccgagccttgaaggcagcgtcggggcagcgcagttcctgccgttctgtaccccggcaatcaacctgtttcccaagcgcgtggaccggatccacttgtccgaccgggtcaacgagcaccatgtgatcgccgaccgcacgcggccgatggatttcgagattcactccttgagcggcatcaccggccacggcaccgggccggagcaaccgtttttgccgttctacgcggtgcgcgacccgtcgcgttatggccgtgaccaggcctattacaccgtgcgccgcgagccgcgcgtactgtccagcgaccagcgccgcaacggtccgcgctccacctatgtgggcagcgaaaccttcgtcagcctggtagacagccggcagtcgccgtaccgccacgacctgcgccagctcggcgtgaccgcgctgtgcaccaaccgcgatctgccgttgttcatgagcgtgggcaacggcaagaccgacttcaccctggccgacagcgcgccggtattgtcggtgcgctgcgtggcaggcccgagccgcccgcgccccagccacgcgcatgacgccaaggcctggcgcctgatcagccagctctcgctcaactatttgtccctgagcgaacagggccagggcgccggcgccttgcgcgaactgctgcgcctgtacggcgacagcaacgacgcagcgctgcaattgcagatcgaaggcctgcgcgacgtcagtagcaaagccgtgactcgacgcctgccgatgcccggcccgatcgtgttcggccgaggcctggagatcaccctggaattcgatgaaaacgcgtttcgcggcaccggtgtgttcctgctcggtgcggtgttggaacgcttcctggcacgctatgtgtcgatcaacagttttaccgagacggtgatccgtaccaccgaacgcggcgagatcatgcgatggaaagccaagcccggacgtcgtccgaccctgtgagtaccctggatgcgatgcaccaggagccctgggaatacgatttcttccaggcgctgcggcgtatcgagtgcgaatcgccggagctgccgcgcctgggccattccctgcgcctggcggatgaccccctgcgcctggggcagcaggccgattgcacgtttgctccggccacgctggcctcggtcgaccccggcggcgacggcaagccggcgcgcctggagcagttcttcttcggccttggcggccccaacggccccctgccgctgcacatcaccgagtacgtgcgcgagcgtcagcgcaacaacgccgacagcaccagcaagcagttcctggatgtgttccaccatcgcctgctgagcctgttctaccgggcctgggccgaggcgcggccgacggtcagccacgaccgcccggacgatgactactggtcggcacgcctcgccgcgctgagcggccggggcatgccgagcctgctgaatcaggggctgatcccggataccgccaagctgcactacagcggccacctgtcggcgcaaacccgctacccggacggcctgaaggcgattctcagcgagtatttcggcctgccggtagagatcgaagagtacgtcggccaatggctggaactgcccgaacgcagccgcgtgagtgtgagcgccaaccgcctgggcgtggacttttgcctgggcagcttcgtgtgggaccgccagcacaaattccgtatccgcctgggcccgctcacgctggatgactacatgggcatgctgcccggccaccagccgttcaacgaactggtggcgtgggtggccgagtacctgggccatgaactggactgggacctgaacctggttttgcaacaacccgaagtcccggcgctgcaactcaacggccagttccgcctgggcttcaacacttggctcggcaaacccgagcatgacgccaacgacctaatcctggcccggcactatgccgaccacgccaccacctcaaggaatccagagcatgggtgaaatcagtcgcgccgcactgttcggcaaactcaacagcgtggcctacaaggccatcgaagccgccaccgtgttctgcaaactgcggggcaacccgtatgtggaactggcccactggtttcaccagttgctgcaactgcaggactcggacctgcaccgcatcatccgccagttcaacgtcgagccggcgcgcctggcccgcgacctcaccgaagcgctggaccgcctgccgcgtggctcgacgtcgatcaccgacctgtcgtcccatgtggaagaagctgtcgagcgcggctgggtctacggcagcctgatgttcggcgaaagccaggtgcgtaccggttacctggtgctcggtattttgaagacaccgagcttgcgccatgcgttgctgggcttgtctgccgaattcgacaagatcaaagccgaggcgctgagcgaacgctttgacgaatacgtcggtgattcgccggagaatgcgttgagcgccagcgacggtttcaatgccggtgttccaggcgaagccagcggcgcgatggcgccgagtgcgatgggcaagcaggaagcgctcaaacgcttcaccgtcgacctgaccgaacaggcgcgcagcggcaagctcgatccgattgttggccgtgatgaagagatccgccaactggtcgacatccttatgcgccgccgtcagaacaacccgatcctcaccggtgaagccggcgtgggcaagaccgccgtggtcgaaggcttcgccctgcgcatcgtcgccggcgacgtgccgccagccttgaaagacgtggaactgcgcagcctcgacgtgggcctgctgcaagccggcgccagcatgaaaggcgagttcgaacagcgtctgcgccaggttatcgaagacgtccaggcctcgcccaagccgatcatcctgtttatcgacgaagcccacaccctggtgggtgccggtggcgccgccggaacaggtgatgccgccaacctgctcaagccggccctggcccgtggcaccttgcgcaccgtggccgccaccacctgggccgagtacaagaagcacatcgagaaagacccggcccttactcgccgcttccaggtcgtgcaggtcgccgaaccgtcggaagacaaggcgctgctgatgatgcgcggcgtggcctcgaccatggaaaaacaccaccaggtgcagatcctcgatgaagccctggaagcgtcggtgaagctgtcccaccgctacatcccggcgcgccagttgccggacaaatccgtgagcctgctggacaccgcctgcgcccgcgtcgccatcagcctgcacgcggtgccggcggaagtggacgacagccgtcgtcgtatcgaggcgttggaaaccgagttgcagatcattgcgcgtgagcatgccatcggtattgcgattggtgcacgccagaccaacaccgaggcgctgttgaatactgagcgtgagcgtctggcgaccttggaaagccgctgggccgaagagaaaaccctggtcgatgagttgctggcgacccgtgcaacgctgcgcgaaaaagcaggcgttgtggacagcggcaacgatgagttgcgtgctcagttggtcgacctgcaacagcgcctcaccgaactgcaaggcgaaaccccgctgatcctgcccaccgtggattaccaggccgtggcctcggtggtcgctgactggaccggcattccggtcggccgcatggcgcgcaatgaattggagacggtgctcaacctcgaccagcacctgaaaaaacgcatcatcggccaggaccacgccctgcagatgatcgccaagcgcatacagacctcccgcgccggcctcgacaacccgagcaagccgattggtgtgttcatgctcgccggcacctcgggggtgggcaagaccgaaaccgccctggccctggccgaagccatgtacggcggcgagcagaacgtcatcaccatcaacatgagcgaattccaagaggcgcacacggtgtcgaccctcaagggcgcgccaccgggttacatcggctacggcgaaggcggcgtgctgaccgaagcggtgcggcgcaagccctacagcgtggtgctgctggacgaagtggaaaaagcccacccggacgtgcacgagatcttcttccaggtgttcgacaagggcgtgatggaagacggcgaaggccgggtgatcgacttcaagaacaccttgatcctgctgaccaccaacgccggcaccgagctgatttcccacgtctgcaaagacccggcgaacatccctgagccggaagacatcgccaaggccctgcgccagccgctgctggagatcttcccgccggccctgctcggccgcctggtgaccattccgtactacccgctcagcgacgagatgctcaaggcgatcacccgcctgcaactgaaccgcatcaagaagcgcgtagagaccacccacaaagtggccttcgactacgacgacgcggtggtagacctgatcgtctcgcgctgcaccgaaaccgagagcggcgggcgcatgatcgataccatcctcaccaacagcctgctgccggacatgagccgtgagttcctcacgcgcatgctggagggcaaggcgctggcgggtgtgcgcatcagcagccgggataacgagctgcattacgacttcagcgattgacctgtcgaaatgtgattaaaattgtgggagggggcttgcccccgatggcgtcgggtcagccagaaatttctaacctgatacaccgctatcgggggcaagccccctcccacacttgattcggtttcttcagttatcaagtcatttacgggttaaccgatgctattcaaccaagcctcacgcctggccaagatcaccagccccctcgggccggatgtgctgctgctcaatgaaatgggcggcggcgaagagctgggcaggctgttcagttacgagctgcaactgacgtccctggacgccaacatcgacctcaaccagttgctcggcaaacccatgagcgtgggcctgcaactggcggacggcggtgaacggcacttccacggcatcgtcgcgcggtgtagccagaacatcgaccagggccagttcgccagttaccaggtgaccctgcgtccgtggctgtggctgctcagccgcacctccgattgccggattttccagaacctgagcatcccgcagatcatcaagcaggtgttccgcgacctgggcttttccgacttcgaagacgccctgagccggccgtaccgcgagtgggaatactgcgtgcagtaccgcgagaccagcttcgatttcgtcagccgcttgatggaacaggaaggcatctactacttcttccgccacgagcaagaccgccatgtgctggtgctggccgatgcctacggcgcccacaccacggtgccgggctacgcgtcgatcccgtattaccccaaggacgaacagcagcgcgaacgcgaccacatgcacaactggcacctggcgcaggaagtgcaaccgggttcactggagctcaacgactacgacttccagcgccccagcgccagcatcgacgtgcgctctgccatgccgcgcccgcacaccgccggcgactacccgctgtacgactaccccggcacctacgtgcaaagcgcagacggcgaacattacgcgcgcacgcgcatcgaagccctgcaaaccctgcatgaacagatcgagttcagcggcaatgcgcgggggttgggttcggggcatttgttcagcctcaccggcttcagccgccaggaccagaaccgcgaatacctgatcgtcggttgccgctactacatcgtccaggaaagcctggaaagcggcggtggttcaggctctgcgcaatttgaaagcagcctcacgtgtatcgacgcccagcagagcttccgcccgttggccagcacccaccgccctatcgtcaaaggcccgcaaaccgcgctggtggtcggccccaagggcgaggaaatctggactgaccaatacggccgcgtgaaggtgcacttctactgggaccgccacgaccaatccaacgagaacagctcgtgctggattcgcgtgtcgcaatcctgggccggcaagaactggggttcgatgcagattccacggatcggccaggaagtgattgtgagctttctggaaggtgatcccgaccgaccgatcatcaccgggcgggtgtacaacgccgagcagaccgtgccttacgacctgccggaaaacgccacccagagcggcatgaaaagccgttcgagcaagggcggcacgccggccaacttcaatgaaatccgcatggaggacaagaaggggttggagcagctgtatatccatgccgagcgcaaccaggacatcgtggtcgaggtggatgagagccattcggtggggcatgaccgcaacaagagcatcggccacaacgagacggtgaccatcggcaacaaccgcctgcgcatcgtcaagcaggaagacatcctctcggtgggccagcgcaagaccgacagcatcagccagagctacgtcatagaagtgggcgaaaacctgcggctggtgtgcggcgaaagcatcctggagttgaacgccagcggacagatcaacctcaccggcgtgcagatcagcttctatgccagcggcgacgccgagttcaacacaggcggcgtgctgcacctgaacaacggtggcggccccggcgccacacccgatggccagggccagaaagccgccatcgacgccaatatcaaagccgcgttccccgcgcctaaaagctcctgacgagacctgttctcatgacgtatcgaatcaacgaattccagtttcaactgcccgccagcgagttgcaggacgcgacgatcaatatcctcaagttccctgaattgggcacctccctgatcgtcagccgtagcctgctcgccgagggtgaaaccctgcacagcaacttcaatgaccagctccagcgcctggaaaaacaggtacaggatctgcgttatcagccgggcgttgatgtgcgcctgggcgccgcgcaagaggtcgaaggcattgagctgcgcagccagttcaacaagggcaatgacaaggtgttccagtatcaactggcgctagtgctaccgggtacgcgcaagatgcttgccttgagttacgtgaaagccgacaagctcggggatgccgaggcggcgcattggtcgacgatcaagggctcgctcgtgttcgacgtcccccagtgaagcggcctttgcatgtctgacgcactgctctgggctgcgcgcctgggcgatgggctgtcccacacctctgtcatggcggacatcctcggcggcgtactggaggtggcggccaatgtggcgattactgcattggcgaccgctgcggtggtggcggctaccggcattaccgtcgcgaccggtggactgggggcctgcgtgctgggggcggtcgtcggcgtcatcgtcggcatcgccatgagcaagaccggggccgacaaggggttgagcgccatgtgcgaaggaatcggcaacgcgctgttccctccctcggtcatggccacgatccttagcgggtccaccgacacactgatcaacgccttgcccgctgcgcgcgcggccggcgtcgtgccctcccacgttgcacctgcgggcaccgaaaccgaagcgccgccgccagcaccggaacacagccaagagcccggctacctggacatggccaaaggattctttgcgcaaatgtggcgccccaccgtcgccacgccagcgccaggtgcagtccctaaaccgctggacgtggtgacctgcacaaaacacccgccgatgccgccgcagtttctggccgaaggctcggaaaaggtcacggtcaacggtcaaccggcggtacgcagcggtgaccgcagcacctgcgatgccaccgtggtgtcgtcagggctgatttcgcccaatgtgactatcggcggcggctcagtcgtggtgcgcgagatccgcagcggcaagacgccgggggttggcctggccgtcactgcgctgatgatgctcaaggggggtaaaggcaagttcctcagcaaccttccctgcatgctgctggcaggtgtcaattcgtttgtggtcagtcaggccatgggcgcactggccaacgccgccatgggctcttccaacccggtgcacgcgagcacgggggccaaggtgctgggcggtcccgaggagctggatttcgccttgcccggaatcatgcccatcgactggcagcgtttctacaacagccgagatgaacgccgcgatggcttgtttggtgccggctggagtgtgccctatgaagtcagcgtgcagctgctgcctcactctgaagggggcgactacgcgttgtacatcgacgagcagggtcgacgtatcgacatgggttcgatccctttgggcggtgccgtgttcagcgctggcgaaggcctcagcgtcaagcgtcacttgaacggccagtggctgatcgaaagcgcagacggcttgtaccggctattcgatccggcgccacaggactcatcgttgctacgcctgagccaactgggagatcgcaacgacaaccgaatccacctcgactatgccgacgatggtcgcctgctgggcctgcgtgacacctttgacctggtcagggtcgagctgacctacgacagcacttggccccggcgcgtcagccggatcgaacggctgtatcccgaccaccaccgtgaagcactgatgcattacgcctacgacgtccgtggcgacctggccgctgtacgccagtccgacgggcacgtgaagcgccgttttgcctatgatgccgggcagcgcatggtcgagcatcaactgcccagcggcctgcgttgcttctatcagtgggccagggttgacgaccgtgaatggcgtgttgtgcggcattggacggaggccggggacacctacacattcgactatgcgctggacaccggcatcacccgtatcaccgacgggctggcgcgtgtcagcattcgacactgggatgagcgacaccagatcatcgcgtccaccgatgcactggggcgaacctgggccttccggtggaatgatgaaagccaactactgggcgcaaccgaccctctcggtgggcattatcagttcagctacgacgatgccggcaacctgactgagaccctcgaccccctggggcgcagtgaatcgaccttgtggctggagcactgggcgctgccactggcggagaccgatgccgctggcaatacctggcagtaccattacgactcgcggggcaactgcattcgcgaaaccgacccgctgggcaaccgcacggtctatcactatgacggacacggccaggtcagggagatcatcgacgccagcggcaagcgcaagaccttgcgctggtccccactgggtcaattgaccgagcacaccgactgtacgggcctgaccacccgtttgagctactgcaagcgaggcttgctgctggccagtaccgacgcgctcggggaacgcaccaccttcaagtatgacgaccagggccgcctgatcagcaagcagttgcccgatgggcgcaacgagcactatcagcgtgacgtcagcggccagttgatcggctacagcgaccctgccggccacaccacgcgctttgagcatgcgtcgaacggccagttgcgccaacgcatcgacgcccatggccgccgtgtggagttgagccacgacgcctatggccgcctgcacagcctgaccaacgaaaatggcgagcgctaccgattcgactgggacgacggtgatcgcctgaccctcgaacagcgcctggacggctgccggaaacggtacacgtacgacccgctggacaatgtcacacaggtagaaaccctcgcatcgtccgacaccgagcccgccatcattcatgatctggagcgggacgcagctggccggctgatcgccaagcgcaccgtggatggctgcacgacgtaccgctacgatgagctcgaccaagtcacagccatcacctttacaggccacgacggcgagcagcaaaccctgggcttcggttatgacgccctcggccagctgacccttgaacaaagcgccgccggttgcctggagcatctctacgacgaattgggcaacctggcccagacccgccttcccgacggccgctggctcaaccgcctgcgctacggtagcgggcacttgcatcaggtcaacctggatgggcaggtcatcagtgacttcgagcgcgaccgtctgcatcgcgaagtgctgcgcacccagggccgcatcagcacgcgttgcgaatatgaccgcagtggacgtctgcgcgcccgccagcgccgccaaccggaccattcactgttacatccaccggcgcagacacgcctgggctatgacgacagcgaccaactggtcgaacgctacgacagccagcccggcgcggcacaccgccaattactgcattacgacgccaccggccgcattctggctagccaggacaacctcttgggccaacgggaagccttccgctacgacccggccgccaacctgttggatggctcaggacaggtcgcccacaaccgattgctgacctaccaggacaaacactaccgctatgacggttttggccggatggttgaaaagcgcagccttcggcgcggcacccagcgcttcagctacgacgcggagcaacggctggcacaggtgcataacgatgacggctcccgggtcgtcatgacctatgacccgctgggccgacgcaccgccaagaccacctacgactgcaacggtgtgcagcgcagccagacacgtttcacttgggacgcgttgcaactcgtgcaggagcactgcaatcagcagagcagcctctatatctatgccgacgagggctacgaaccactggcccgtgtcgacggcatgggtcacctgcaaaaaatccgctactaccacaacgacctcaacggattgcccgaacgcctcaccgagagcgacggccatacggtgtggcaagcgcgctatgaagtctggggcaataccgtcgaggaaagccgagaaccctacttcatcgaagaacagaacctgcgtttccagggccagtatctggaccgggaaacggggctgcactacaacactctgcgcttttatgacccggatatcgggcgcttcaccacacccgatcccatcggtctggccggcggcctgaatctctaccaatatgcgcccaacccgctgagctggattgacccgttgggcctgatgaaatgctccagcccacccaaggggcgcaaggtcagtcgcaccgtgtatcggttcgaggaaccggggcgcatcgggaccacttggcaggcacacaagtggaatgtggagtccacccaccgctacaccaccaaaggcgtcggcggggtgtatggcgcgaactcacggaaaaccgcgctgggcgaggtcacgcactggaaggtcgacctgtccaaacgggtgttggtcagcaagaaagtgcagctcaataatgtcctggatctgacccgcgccgatgtgcgcaaacagctaggggtcagccttaaaagcatcaccggctcgaagtacaccgagacccatcagatcggcaattgggccaaggccaacggctatgatggaatcctggcgccatcggcacgcaacccgaccggcagcaacttgatctcctttgcaggtttttgaacatggaacgactggaaaacgaatacccgggtgacgcggactggcagagcacagtggccctgtatgaagaggactaccttgacgacgatgcgcgtgaactggccaaggccttgggcggccatctcgacctggcagtgatactgcgtggaaaacgaggccttgaagaggggttgtggtggatcgggcaaaaggttccggcactcgacaacctcaccccgctggagtgcctggaaagtcccacgctgataaaacgcttgaagacagcactgatgcgcatgccataacacccaaggacacggcgactatggaaagttgtgcgttcaattcaatcagacacaggagtgcagtgcgtgtctgatgcactctgggcggcccggatgggcgatgcgctgactcacacctcgatgatggcggacatccttggcggggtgctggaggtcgcggccaatatcgcgatcacggctgtggcgacggcggctgtcgtcgccgccactgggattaccgtcgccaccggtgggcttggctgtttcctgcttggtgcagtggtgggcacgattgtcggcctggccatgagcaagaccggggccgacaaaggcctgacgaatttatgcgatacgttcgccaacgcgctgtttccgcccacggtgcaggccaatattcttaccggcgccaccgacactctcaccaacaacatcccggccgcccgcgccgccggggcgatcagttcccatgtcgcgccggccgggaccgaactggaagaacccacacccgagccggaagccagctatctggatatggccgaaagtttcttctcgcagatgtggcgccccacggttgcaaccccggcgccgggcgccgtgcccaagccgctggacctggtggtgtgcatgaagcacccccctatgcctccgcagttcctggccgagggctcggataaggtcatgatcaatggccaaccggcagtgcgcagcggtgatcgcagcacctgcgatgcaacggtggtgtcgtccggcctgatttcctccaacgtgaccattggcggtggctcggtggtggtgcgcgagattcgcagtggcaagacgccgggcgtggggctggcggtcacggcactgttgatgctcaagggcggcaagggcaagtttttcagcaagttgccgtgcatgttgatcggcggcgctacgtcgatggcggtcagcagcgcgatgggggccgtggcgaacgcagcgatgggctcttcgaatccggtgcatgcggccaccggcgcgaaggtgctgggcggcgatgatgagctggatttcgtcctgcccggcatcctgccgattgattggcaacgcttctacaacagccgcgacgcacgcacgggcagtcttttcggcgcaggctggagcgtgccgtatgaagtgtgcgtcgacatccagcctcaccccgatggcggcgaaacgctggtctacaccgatgaacaaggccgccccatcgacatgggctcgattcccttgggcggcgccgtgttcagcgcgggtgaagggctggccgtgcggcgacatctcaatgggcagttgctgatcgaaagcgatgacgggttgtatcgcttgtttgaaccctctgccaacccgtcgttgctgcgccttagccagctcggcgaccgaaatgacaaccgcatccaagtcgactacgacgccgccgggcaactggtgcgactgcgcgataccttcgacctggtgcaggttgagttgatccgtgatcagggccagttggcgcgcatcgaacgcctgtaccccgatcagcgccgcgaagtgctcgtcagctatggcttcgacgcgcagggcagcctggctgaagtgcgcgataccactggccaggtccagcggcgtttcgcctacgacagtggccagcggatggtggagcatcaactgcccaccggattgcgctgcttctatgagtgggccttggttgaagacctggaatggcgcgtggtgcggcactggaccgacgaaggcgacgcctaccagttcgactatgacttgcaggccggtatcacgcgaattaccgatggcctgcaacgcgtcagtacccggcattggaacacccaacaccagatcattcgatacagcgacaatctcggccacacctggctgttcgaatggaacgacgagcgccagttgctcagtgccactgatccgctgggcgggcgctttgcatacagctatgacgaggccggcaacctgatcggcgaaaccgacccgctagggcgcagcgattcgaccttgtggcttgagcactgggcactgccactggtggagaccgacgccgccgacaatagctgggcgtatcgctacgatcagcgcggcaactgcatcgccgaaaccgatccgctgggctacgtcacccgctaccgctatgacgaccacggtcaggtcgtggaaatcatcgatgccaccggcaaaagcaaaaagctgcgctggaatccgttcgggcaactggtcgagcataccgactgctcgggttacccgacgcgtttcagctatgacgagcgcggctatctgcaggtcatcaccgatgctctcggcgaacgcactcaattcagctatgacgcacaggggcgcttgctcaccacccagttgccagacggtcgtatcgagcagtaccagcgcgatacgagcgggcaactggtgggttacaccgacccggccggacataccacgttgtaccagcacaaccgtcgcgggcaggtacgccagcgcatcgatgcccatggccggcaagtgcagttcggctatgacagctatgggcggttgcaggcactgatcaatgagaacggcgagcgatatcgtttcgcgtgggacgctggcgatcggctggttgagcagcaagacctcgatggcagcgccaagcgctacgattacgacgcgttggataatgtcacgacgctgacggccgttcccgcgccttacggcaatggcctggcgttggtgcccgacataccacccgcgcctatcgtgcatcgactcgaacgcgatgcggtcggccggttggtgaccaaaaccacggacgatggccgcaccgagtaccgctacgacgagctcgaccaactcactgctgtcaccttcaccgacctgcaaggcaacgcccaggccctgggcttcgcctacgacgccctcggccagttggtgaccgaacaaagctcggcaggcggcctgcaccaccactacgacgagctcggcaacctgatccagacccaactgccggacggccgctggctcaatcgcctgtactatggcagcggccacctgcaccagatcaacctcgacggccaggtcatcagcgacttcgaacgcgaccgcctgcaccgcgaagtgctgcgtacccagggccagctcagcacccgcagcgaatacgaccgcagcggccgcctgcgcgcacgtcagcgtcgtcacgccggtcaatccaccttgctgcccgctgcggcgcaaaaacagttcgagtacgaccccgccgacaacctgatcggcaaactcgaccagcagcccgccacgcaacaccgccaactgctgcactacgacgccaccggccgcatcatcgccagccaagacagcctgcacggccagcgtgaaaccttcgcctacgacgccgccgccaacttgctggacggcccgcaggctggcgcggggttggtggtgcataacaagctgctgacctatcaggacaagcgttatcgctatgacgcgtttggccgcacgattgaaaaacgcagcgccaaacggggcgtgcagcggtttgcctacgatgctgaaagccgcttggttgaagtgcgtaacgatgacggcagcgtcgtgcgaatgacctatgacccactgggccgacgcatcgaaaaaaccgagcatggccgtgacgggtatccgctgggagaaacgcagtttgtgtgggatggactgcggttgttgcaggagcataaacacagccagaccagcctctatgtttacgacgatgacggctacgaaccgctggcccgcgtcgacggccttggcccgttgcagaagattcgctactaccacaacgacctgaacgggttgcccgaacaactgaccgaggccgatgggcacagcgtctggcaggcgacttatcgggtgtggggcaacacactggaggaagtgcgcgagccttattacattgaagagcagaatctgcggttccaggggcagtacctggatcgggagacggggctgcatttcaatacgttcaggttttatgatccggatgtggggcggtttactacgccggatccgattgggtttgatggtgggctcaatttttaccagtacgcccccaatccaatatcctggattgatccatggggtctggcccccgagctttactatctgattgcgaagaaagatggcctttatgatgaaatggcgtggggccataaaaagccagttggtaaagtttatttgaagaaaggtgaagtctggaaagtcggtgaaactgtcaatccgaacaggcgatacacgcaaaagtggctcaaagctaacaacctcgcttacaaacgcgtgatggcggcccccacgaaaggcaacatgcaagtatgggaaaggctaaaaatcggaaagtatttcaaacgccgaggaaaactgcctccaggtaacaagtgcagacactgagatgaggattactttatgcgagtcgatacaacatcggactcacccagctggacaaaagtctttgaaatcactgacgagctaaatggcttgagtgagattcttgagaagaaatatccctccctcgactgggaacttgcagtctgcatgcgatgcctgcctcaggggctcgagcggaaaacattttgccgttactacaccaaagacaaaatgttcggcctggacatcgctatggacgaggaagatttcatcccgtacaaaaaggataaggccgctcaacgtaaattaatcggcgcagcgttttttgagttttttgttgagagcattaaaaaatacgaaaaaaagctccccaatcttcagccggtttcagaacaactgatcgccgatgtgaagcaatggtgtaccgaaaacgaatgggtagcctgaaatcccaaaaaaggctacggggtgccccacaaaaaatgggcacccaaccccgtcggcgtgcccatttttcctaccaccccgcccccttcgagacggtaacgctcttacgcgttaacagtgtctttcagcgatttacccggcttgaacgcaaccgtgttgctggccttgattttcaccggctcaccggtttgagggtttttgccagtgcgagcgccacggtggcgttgcaggaaggtgccgaagccaaccagggtgacgctgtccttgcggtgcagggcgcctgtgatttcttcgagaacggcgttgaggacgcggttggcctgttctttagtgagatcggctttttcagcgatggcggctgcgagttctggtttacgcataagtgaagcctctttgacggttttttgttgttatgtccgtgctgctctcttctggagcagcgcccaaagcgccgcaggctctactctgcggcagacgggagtgaggatggcatgccctcgcacgctccgccagtctagcggcgacctttctggagggaaaaacgtgcttattccgacagaacgaccggtatttacgccagcaacggcggaagttctttgttgagggccagtttttccatcacggcgctcccagtcagtgcgtaacccagcaggcgaccgctggcgtcacggcacagggccttgatgtcggcgccctcgccttcgacgctccagacaccttcggtgcctcgtggcggtggcgacaccaccagcgggcagatcggggttttcacggtcaccggcattgggccgtagctgacggcggtggcgtttccggccagggtctgagccagggcgcgggcgcagctcatcagcggcatcacgtacagcaggttcaggccgtcgacctcggcgcagtcgcccagggcgtagatgttggcgtgggaggtcttgaggtggcggtccaccatgatcccgcgattggtctgcaggcccgcggcggcggccaggtcgacgcgggggcgcaggccgatggccgagaccaccaggtcgcaggcgatcacttcgccgtccgacaggtgggcttccaggccatcagcgttgcgttgcaggcgattgagcaccgggcccaggtggaagcgcgcgccgaggccttcaaggcccgcctggactgcggcggcggcagccgggtgcagcagggtcggcatgacctgctcgcacggcgccaccaggtcgatttcataaccgcccaggatcaggtcattggcgaactcgcagccgatcaggccggcgccgagcagcagcacgcggcgcttgccggcagcggcagcacgaaagcgtgcgtagtcttcaaggtcgttgatcgggaaaatcaggtcagccgcatcgccttcaaccggcacacgcacggtttccgcgccccaggccaggatcaggtcgcggtaggccaccgcttcttcgccgatccataggcgtttgtggccggggtcaatgccgctgacgcgggtatgggtacgcacttcggccttgagttgctcggccatggcgccgggttcagccatgctcaggccatcggcttccttgttcttgccaaagccggtggagagcatgggcttggagtaggagcgcccgtcatcggcagtgatcagcagcaatggggtctcgctgtcgagcttgcgaaactcccgggccaggttgtaaccggccaaccctgtgccgatgatcacgacaggtgcgttcattcctttctccttgtaatacttttctgaaaatcgagaatcagccgatttcgatcatttcgaaatccattttgcccacgccgcagtccgggcacagccagtcttccgggacatcttcccaacgggtgccaggcagaatgccgtcatccggccagccatccttttcgtcgtagatcagcccacagacgacacattgccacttcttcattacttgcttcctcagggtccaggcatcttggccgacggtcgatagacccgcgttgccgtacggctcagggcgttttgtactgatcgtggccggcagatgcaagcatgatcgacgcaaacagccggttgcgtccggcaaaaaccctgatcgccatggtaagctcgccgcctcttttgctgccgatactgactcaccgtgccgcactcaatcgaccctgccgatgcttgccaatggctgccccagagccttctgagccccatacccgggccctcgacccttgattggttgttcgatacaggctcgatgacccagcggttgacccagctgtcaaacaacggcttcagcatcaccccgctgttcgagggttggcagccgctgcgggatgatgaatgcgtggcccttggcctgccgctggcgacagttggctgggtgcgcgagacctatctgcatggcaatggccaaccctgggtattcgcccgttgcgtagccgcgcgcagtactttgcagggtgacggcttgcacatggatgcactgggcagccgcccgctggggtctctcctgttcagcgatcatgcgttcaaccgccaggccatcgaagtgtgccgctaccccagccagtggttgcctgcggaccaccagattgaagggctttgggcgcgccgctcgcgctttgatcgcggcccgctgagcgtgctggtcgcagaagttttcctgccgggcctgtggcaagccgtgcacaaccatgcggagaattgctgatgtatcaacgtctgctcaagtccttgaaccacctgaaccccagggcctgggatttcattcagttgacccgcatggacaagcccatcggcatctacctgctgttgtggccgacgctgtgggcgctgtggatcgccggcaaaggctcgccctctttaatcaatatcgtgatcttcgtgctgggcgtggtgctgactcgcgccggcggctgcgtgatcaatgactgggccgaccgcaaggtcgacggccacgtaaagcgcaccgagcaacgcccactggtcagcggcaagatcacttctaaagaggcactggtgttttttgcggtgctgatgggcatcagtttcctgctggtgctgctgaccaacgccaccactatcctgctgtccctcggtggcctggcgctggcggcgagctacccgttcatgaagcgctacacctattacccgcaggtggtgttgggggcggcgttttcctggggcatgccgatggcgttcaccgccgagaccggcagcctgcctgccaccgcgtggctgctctatatcgccaatctgctctggacggtcggctacgacacttattacgcgatgaccgaccgggatgacgacttgaagatcggtgtgaaatccaccgccattttgtttggtgatgccgatcgcgtgatcattctgacgctacaagggctgtcgctggtgtgcctgttgctggcgggtgcgcgattcgagttgggtggctggttccacctgggtctggtggccgcggcgggctgttttgcctgggagttctggtatacccgggacaaggaccgcatgaagtgcttcaaggcgttcctgcacaaccactgggcggggttggcgatatttgtcgggattgtgctggattacgcgtttcgctgaggattttgtggcggctgtcgcgacctcatcgggggcaagccccctcccacagttggaatgtgttcgcctgtaggagggggcttgcccccgatgctttcagtggcgccgcgtgatcaaggtttggcgaccttccaggccccgtccattttgccctcaccggtcatgtcgcccgctttcttgtccatgatgaaggtatagagcggcttcccgctgtatgcccattggcttttttgatcgtcacgggtgatgacggtccatttacccataggcttgtcggtggattcggccatcagtgggggccagttggtggcgcacttgtcgttgcacatggacttgccatcggcgtccttggcaaaggtgtagagcgtcatgcccttgtgatccaccagcatcccgtctttggtcatcgccggctccgccgcgaacgccaggcccggcagcgtcaatgccgccgtcaccagcagggctttccaggaaatcgtgctgtaagtcatcggaaccttccttttgtggttgtcaggattcggactcaaagcgtagtccagagaggcgggaattgcccgagcgactaaattactgtcacacgactgcaataattccgttatctaatgcggcgcaagacagttaaatgacaagaggattttcgagcatggttggcaggagcattctgattgttgacgacgaagcgcccatccgcgagatgatcgccgttgcgttggaaatggccggctacgactgcctggaggccgagaactcccagcaggcccatgccattatcgtcgaccgcaagccggacctgatcctgctggactggatgctgcccggcacctccggcatcgaactggcccgccgtctcaaacgtgacgagctgaccggggacatcccgatcatcatgctcaccgccaagggcgaagaggacaacaagatccagggcctggaagtgggtgccgatgactacatcaccaagcctttttccccacgggaactggtcgcacgcctgaaagccgtactgcgccgtgccggtcctaccgatggcgaagcgcctatcgaagtcggcggcctgctgctggacccgatcagccaccgcgtgaccatcgacggcaaaccggccgagatgggccccaccgaataccgtctgctgcaattcttcatgacccaccaggaacgtgcctacacccgtggccaattgctggaccaggtgtggggcggcaacgtgtacgtggaagagcgcaccgtggacgtgcatatccgtcgcctgcgcaaagccttgggcgatgcctacgagaatctggtacaaaccgtgcgcggtactggttaccgcttctctaccaagggctgagccaatcgcagcctgacttaacagctgacaaggacgcatgttcaagtgaaccaaaactggcatggcaccctgatccgccacatgcttttgctgatcaccggctgcctgctggttggcctggtcagcggctattacggctggagcctggcagtcggcattgccctgtacctgggctggaccctcaagcaactgctgcgcctgcacgaatggttgcgccagcacaaacccgacgaagcgccacccgatggctacggcctgtggggcgaggtgttcgacagcatctaccacctgcaacgccgcgaccagcgtgtgcgcgggcgcctgcaagcggtgatcgaccgggtgcaggagtccaccgccgcgctcaaggacgcggtgatcatgctcgacagcgacggcaacctggaatggtggaaccgcgccgccgaaaccctgctgggcctcaagacgccccaggacagcggccagccggtgaccaacctggtgcgccacccgcgcttcaaggagtacttcgaacaggagaactacgaagaagccctggaaatcccctcgcccaccaatgaccgcgtacgcatccagctgtacctgacacgctacggcaacaatgaacacctgatgctggtgcgcgacgtcacccgcatccaccagctggaacagatgcgcaaagacttcgtcgccaacgtctcccacgagttgcgtacaccgctgacggtgatctgcggctacctggagacgctgctggacaacgtcgacgagatcaacccccgctggagccgggccctgcaacaaatgcagcagcaaggttcgcgcatgcagacactgctcaacgacctgctgttgctggccaagctggaggccaccgattacccgtcggacaaccacccggtggcggtgcagagcctgttgcagaccatcaagaacgacgcccaggccctctccggccaacgcgggcagcagatcaccctggaagccgacccggccgtattgctcaagggcagcgaaggcgagttgcgcagcgcgttttccaacctggtgttcaatgccgtgaaatacacccaggacaaaggcaatatccgcatccgctggtgggccgacgaccaaggcgcgcacttgagcgtgcaggactccggcatcggcatcgacgccaagcacctgccgcgcctgaccgagcgtttctaccgtgtcgactccagccgcaattccaacaccggtggcaccgggctcggcctggcgatcgtcaaacacgtgctgctgcgccatcgcgcacgcctggaaatcagcagcgtgctgggacatggcagcacgtttacctgccattttccgccggcgcagatgacgcgttcgcgagccctcagcaacgacgagtaatccaaatacaccacgggcctaaatgtgggagggggcttgcccccgatggcggcgggtcagatatgaatgcgctgcctgacatactgccatcgggggcaagccccctcccacaggggaccggtgttgttttagagagtgcattccagccccgcccggcagtgggcactaggcaagcgccccgtcagccgctacattggccgacttgcgcctgcctttcaggcccacctgccaccccttactgaacatacggaacctgcaaaaccccatcatggacccttcccctggtatcaccctcgcgacactcttcgccgacttcggcatgattctttttgcactggtcctggtactgctcaacggtttcttcgttgcggcggaatttgccatggtcaagctgcgcgccacccgggtcgaggccatcgcccacaaaaacggctggcgcggacagatcctgcgcaccgtgcacagccagctcgacgcctacctgtcggcctgccagctgggtatcaccctcgcctccctgggcctgggctgggtcggtgagccggccttcgcgcatatcctcgagccgctgctgggcgccgtgggcgtcgagtcgccggaagtgatcaagggcgtgtcgttctttgcggcgttcttcgtgatttcctacctgcacatcgtcgttggtgagttggcgcccaagtcctgggcgattcgcaagcccgagttgctgtcgctgtggacggcggtgccgctgtacctgttctactgggccatgtacccggcgatctacctgctcaacgccagcgccaacgccatcctgcgcatcgccggccaaggcgagcctggcccacaccatgagcaccactacagccgcgaagagctcaagctgatcctgcactccagccgtggccaggacccgagcgaccaaggcatgcgtgtactggcctccgccgtggaaatgggcgagctggaagtggtggactgggccaactcccgggaagacctggtgaccctggacttcaacgccccgctcaaggaaatcctcgcgctgttccgtcgtcacaagttcagccgttacccggtgtatgacgcggtacgcaacgaattcgtgggcctgctgcacatcaaggacctgctgctggaactggcggccctggaccacatccccgagtcgttcaacctggccgagctgacccgcccactggagcgtgtgtcgcggcacatgccgttgtcgcagctgctggagcagttccgcaaaggcggcgcgcacttcgccctggtggaagaagccgacggcaagatcatcggctacctcaccatggaagacgtgctggaagtactggtgggcgatatccaggacgaacaccgcaaggccgagcgcggcatcctggcctatcagccgggcaagctgctggtacgtggcgatacgcccctgttcaaggtcgaacgcctgctgggcgtggacctggaccacatcgaagccgaaaccctcgccggcctgatctacgacaccctcaagcgggtgccggaagaggaggaagtgctggaggttgaaggtttgcgcatcatcatcaagaagatgaaagggccgaagatcgtgttggccaaggtgctgctgctggattgaccgtcaattgcccaatgcaaagttgggcaatgcaccgaccggctggttgaactcatacggaatcgagaccagccccgcctcggtggcgcgctgcaccacaaaatgcaggtgcggcccgctgctgttgccggtattgcccgacaacgccagcggactgcccaccgccacacgctgaccgacccggacgctgaccgaaccttgcttgaggtgcaggtacacgccctcggtgccgtcgtcgtggcgcaccctcacgaaattccccgacgcatcgctgccgcgcccggcctgcgcgttttcggtcttcaccaccattccactacgcgccgcaatgatcggcgtgccttcgggcatggcgatatccatggcgtagcgacttttggcgtcggtgtggctgaagctgccgttggggccttgggtcatgcggaaggggccgccacgccagggcaaggggtagcggtaggcttgttgtgcacgattgggcccgggcacgacaagcatcggtcgctcaaccttgcgctcctggatcacaaacacctgggcgccaggcgtatgccggtcgctgataaacaccaggccattggcatcgacggatttgtagagggtcatggcctgggccgacatagcgaccgttgccagcccgcagcacagcaaaaagcgcatgagcatggcgtgaacctgccgggatgactgaacggcaggttagcgcggtttgatgacaacttcaggcaggcagcccgttgaaacaaatatccacgttcatttgggcagccgccgacaaattgaccaaggcatccagggagagtttgtcgatcttgcccgtgagaacgtcgttaagtcggggctgactgatccccagtctttgcgccgcatctttttgagaaagctcccagctgcgaatggtttggcacagctccaaaagcaattttgaacgcagccgcatattggcagcttgctggggtgtctcttccagagcgtcccaaacagagctgaaacgctcgccgtaaactttttgatttgccatgggctcaccctaactcctgcaatctggcgcgagccagctcgatatcacgcccttcggttttctgtgaggtcttgcgcagcgcgtgcaacacatagatggcctctggccggttgaccacatagaacacccgaaaagcacccgattcttcagtgatccggatctcactgacgcccctcccaatggtcttcatcggcttgcagtcaaagggttgctcaccctgctgcaagagatccaactgaaaacccactgccctccgagcatcgagcggaaacgctttgagatccttgagcgagcttcctagaaacaccacatccttgtgccttggcattggcttctcttctcctttcatggaaagaaaaagcgtaatcgacgattcggccaagagacgtggaggtttgtttcaaggcatagcaaaggctcgataacaccggagcgttatcgagagactatatcgaaacagatataaatcaaggcaggcaccgggaatcagacagtcggtcgattcccggcaatcagagaatcacgcacccggcacaaaatgcttctgtgctgtaccgcgcgcaatcaggcgggagatgtagtcgagcttctgcgcatcctggtcgataaaccggaaggtcagttgcagccaatcgctgtccggcttcggttcaaaggcgacgatggcgtgcaggtaaccattgaggcgggccacttcggcgttgtcgccttgttccaggtcgagcacggcgctttccaggacctggggcaggacttcaccgcgacgcaccaccagcagcgcttccttgatgctcagcgccttgatcacgcattgctgggtgccgctggacaggcgcaattggccctggccacgaccacccgccggcgcagccgctatcggcgcctgcaccggtgggctgttgagcaagcctttgttaggcgcaggcgcagcagcaacaggagccgcacgtgccacttcgggtttgccgccggtcagggcgctcaaggaatcgttgccgaacgccgagttcatcttggtcggcgcgctggcgaccagggcgtcgaggcggccgatcttgtgcagggcctgcttgaccttgttcagcaactgttcgttggtgaacggtttgctgacgtagcctgaaaccccggcctggatagcctggactacgttttccttgtcgccacggctggtgaccatcacgaacggcatggctttgaggtgaggctgctcgcggcaccaggtcaacagctcaaggccggacatctccggcatttcccagtcgcacagcaccaggtcgaaggtctcgcgcatcaggatggcctgggcctttttgccgttcaccgcgtcttcaagcttgatcccggggaagtaattgcgcaggcacttcttcaccaggtcgcggataaacgaggcgtcatccaccaccaatacactgactttactcatcgacccttcatcctataaaaacttcggcacgcaagacgcctgactgatggcattttgccaaaaactctgcagtcacgttgggactttcttgtgtcccctcgctgaaaaattcgcgcccgcaaacaaaaacgcccgaccaaaggccgggcgttaatttctcgggcaaccttacttatcgtcaggtacgcccggaacattagggatttgatcgactgaaccttcaacttcggccttcatgcgcttgaggcccatgtgccgtacgtcggtgccgcgcaccaggtagatcaccagttcggagatattgcgcgcatggtcgccaatccgctccagggagcgcagcacccagataatgctcaagacccgcgagatagagcgcgggtcttccatcatgtaggtggcgagctcacgcagcgcggtcttgtactcacggtcgatgaccttgtcgtactgggccaccgacagggccagttcggcgtcgaagcgggcaaaggcgtcgagcgcatcgcgcaccatgttgcgcacctggtcaccgatgtggcgcacttccacgtaaccgcgtggcgcttcgccttcttcgcacagctggatagcgcggcgggcgatcttggtggcttcgtcgccgatgcgttccaggtcgatcaccgacttggagatgctgatgatcaaccgcaggtcggacgccgccggctggcgtcgggcgagaatgcgcaggcattcttcgtcgatattgcgttccatctggttgatctggtcatcgatctcacgcacttgctgggccaggcccgagtcggcctcgatcagcgcggtgaccgcatcgttgacttgcttctccaccagcccgcccatcgccaggaggtggctgcgcacttcctcgagctcggcgttgaactgcgcggagatgtggtgggtaaggccttctttgctaatcatgttggcgtccttggagcgtccggtaaggtgcggagaaccgcagcgtcagtgcaatcagaaccacagcttcctagccgtagcgaccggtgatgtagtcttcggtctgcttcttcgccggattggtgaacagggtatcggtgtcgccgaattccaccagtttgcccatgtacatgaacgcggtgtagtcggaaacccgcgccgcctgttgcatgttgtgggtcacgataacgatggtgaacttggacttgagctcgtagatcagttcttcgactttcagcgtcgagatcgggtcgagtgccgagcagggttcgtcgagcagcaacacttccggctccacggcgatggtgcgcgcgatcaccaggcgctgttgctggccgccggacaggccgagggccgagtcgtgcaggcggtccttcacttcgtcccacaacgccgcgcctttcaaggcccactcaaccgcttcgtcgaggatgcgcttcttgttgatgccttggatgcgcaagccgtagaccacgttttcgtagatggtcttggggaacgggttgggcttctggaacaccatgcccacgcggcgacgcaactcggccacatcctcacccttacggtagatgttggtgccgtagaggttgatggcaccgtccacgcggcaaccgtccaccaggtcgttcatgcggttgaaggtacgcagcagcgtggacttgccgcagcccgacgggccgatgaaggcggtcacgcgctgcttggggatgttcatgctgacgtcgaacagcgcctgtttttcaccgtagtacaggctcaggcccggtacttcgatggccacggtttcctgggccaggctcaggctctgcttgtcgcgacccagggcagacatgttgatgccgtgggtgtgggtgtcttgttgcatgggatgctccctgtgctgttgtgtgggagggggcttgcccccgatggcagtgtgtcagtcagcacatctgtttctgatccgccgctatcgggggcaagccccctcccacatttattctgcgttcacttataaatcagctatccagcgccttgtacttttcgcgcaggtggttacggatccacaccgccgacaagttgagcgtggcgatcaccagcaccagcagcagcgcggtggcgtacaccagcggccgcgcggcttcgacgttggggctctggaagccgacgtcatagatatggaagcccaggtgcatgatcttctggtccaggtgcaggtacgggtagttgccgtccagcggcagcgacggcgccagtttcaccacgcccaccagcatcagcggcgccacttcaccggcggcgcgggccacagcgaggatcatgccggtcatcattgccgggctggccatcggcagcacgatcttccacagcgtttccgccttggtcgcacccagcgccagggagccctcccgcacggtgcggggaatccgcgccaggccttcttcggtggccacgatcaccaccggcaccgccagcagcgccagggtcagcgaggcccacaacaggcccggcgtaccaaaggtcggtgccggcagggcttcggcgaagaacaggcggtccaccgagccccccaatacatacacgaagaagcccaggccgaacacgccgtagacgatggccggtacaccggccaggttgttcacggcgatacggatgatgcgcgtcagggcgttctgcttggcgtattcacgcaggtacaccgccgccagcacgccgaacggagtgacgatcatcgccatgatcagggtcatcatcacggtgccgaagatggccgggaagatcccgccttcggtgttggcttcccgtgggtcatcgctgaggaattcccagaccttgctgaagtagaagccgatcttggtgatggtgcccatggcgtttggctggtaggcgtgcaccactttgccgatgccgatttccacttccttgccgttcgcatcgcgtgccgtcagggcgtcgcggttgaactgggcgtgcaggtcggccaggcgggcttcgatgtcctgataacgggcattcagctcggcgcggtcggcgtccatatcggcctgggcggcggcgtcgagcttgccttccagttccagtttgcggccatgcaggcggatacgttcgaggccggcgttgatcgcgccgatgtcggacttctccagagtcttgagctgggcagccagcttgttgacgcggtccacacgagcctgcagctccggccaggcagcctcgccttcggcaatgaccttgccatcctgcttgacgttgaccagggtgccgtagaagttgccccactcacgccgctcgatggtcatgagattcgctggcgtggtctggtccttgagccactcgccgacgatccaggtgaagtcgttgccgttcaggtcacggttgccgaccttgatcagctcgcgggtcatgaactccgggccttggtccggcaccggcaggccggcgcttttcaggcgctcgcggggcacttcttccttctgcaccacttcgccgatgacgatatggtttgcctggcccggcacgctgtagttggcctggatcaggtcggccggccagaagtggcccaggccacgcacggcaatcaccgccagcaacccaatagtcatgatgaccgcgatggacaccgcgccaccgctgatccagacaccgggggcgccgctcttgaaccatccattcagggagttctgtttcacagacttctacctttcttaaagcgacgagtatttcttgcgcagacgctgacggatcagctcggcgagggtgttcatgatgaaagtgaacagcagcagtaccagcgccgagaggaacagtacgcggtagtgactgccacccacttccgactcgggcatttccaccgcgacgttggccgccagtgtgcgcaggccttcgaacaggttcatctccatcaccggggtgttaccggtggccatcaacacgatcatggtctcaccgacagcacggcccatgccgatcatcagcgccgagaagatgcccgggctggcggtgaggatgaccacgcgggtcatggtctgccacggcgtggcgcccagggccagggaacccagggtcaggccgcgtggcacgctgaacacggcgtcttcggcgatggagtagatgttcgggatcaccgcgaaacccatggccaggccgaccaccagggcattgcgctggtcgtaggtgatacccaggtcgtgggagatccacatgcgcatgtcgccgccgaagaaccaggtttccaggtacgggctcatgtacagcgagagccagcccacgaacaggatcaccgggatcaaaatcgcgctttcccagccatccggtacacgcaggcgcagggattcaggcaagcggctgaagatgaagccggccaccaggatgccgatcggcaacagcatcaacaggctgaaaatccccggtagatgcccttccacatatggcgccaggaacaggccggcgaagaagccgaggatcaccgtcggcatggcctccatcaactcgatcaccggcttgaccttgcggcgcaggctcggggccatgaagtaggcggtgtagatcgcggcggcaacggccagcggcgcggccagcagcatggcgtagaacgcggccttcaaggtgccgaaggtcagcggggccaggctcatcttgggttcgaagtcggtgttggcggcggtcgactgccagacgtatttaggctcgtcgtagttttcgtaccagaccttgctccacagcgcgctccaggacacttccgggtgcgggttgtcgagcatcagtggttgcagcttgccgcccgcctccacgatcacgcggttggcccgtggcgacaggccgaacacgccctggccgtcgaccaccgggtccaccagcagggtgcggtgggcggtgctgtggaatacgccgaacttgccggacgcgtcgagggcggtgaagcctttgcggcgctcttcggcggtgatttcaatgatcggcgtggcgcccatctggaaggtacggatctgcttgaagcgctgctcgccatccgggtcgcgggccatgaaccactgggccaggccgcccttggagttaccgatgatcagcgagataccgcccaccagctgggtgctcgcggtgacttcagcattgccatcttccagcagtttgtagcgtccattgaggctcttgtcgcgcaggctgaacacatcggccaaagcacggccgttgatcacgtacagccattgctgacgcgggtcgatgaagatcgccttcaccggctcggtcatttgcggcagctcgatacgcttctgctcgctggtgacttcgccggtcatcatgttttcttcgcggctcagggacagcacgttcaagtgcgaaccggcggagcctgccaccaccagggaggagtccgtggcgttgagggccacgtgttccagcgggcggccggcgtcatccagcacgatcggcgtttcaccgtaggggtattcgatcgcgggggtgatggttttcttgccgtccgggtaggacaccttataggtgtggcggaacaccagggactggccgttggacagaccgaggatcaccagcgggctgccgggttggtcttcgccgatagaagcaacactggtgccggcgggcaggggcaggtcgacacgcttgagttcggcaccggtctcgacattaaagaacagcgcctggcccttgtcggaaacccgcatggcgacttggttctgttcttcgagggagatcatcagcggcttgccggcgtcctggatccaggccggggtcagggcgtcttccttggtcaacgaggcgccctggaacagtggcgcgaccacataagccaggaagaagaaaatcagggtgatggcgccgaggacggcgaggccgccgaccagcacgtaccaacgggtcaggcgatccttgagcgcgcgaatgcggcgcttgcgttgcaactcaggcgtattgaagtcaatgcgcttggggggagaagtcgtcgtcatggtggaattggccagatcattcatgcgcacaccctagcgatcctgtatgacagaaagatgacagtgcagtgacgcaacaaatccgccgcgaagcaaggctggcagcggactagaaaattcggatgcggggccggtacgccggccccgcagaggcaatcagttgccttctttcagacccaggtcagccaaggccttggcggcgactttggctggcagcgggatgtagccgtctttcacgacaacttcctggccctgtttggacagaaccagcttcacgaactcggcttccaacggggccagaggcttgttcggagctttgttgacgtacacgtagaggaagcgcgacagcgggtatttgccgttcagggcgttttcttcgctgtcttcgatgaagtcagtgctgcctttcttggccagagccacggtcttcacgctggcggtcttgtagccgatgcccgagtaaccgatgccgttcagcgaggagctgatcgactgcacgaccgacgccgagccgggttgttcgttcacgtttggcttgtagtcgcctttgcacagggcttcttccttgaagtagccgtaggtgccggacaccgagttgcgaccgaacagttgcaccggcttgttggccagatcgccggtcacacccaggtcgccccaggttttcacgtcggctttgccaccgcacaggcgagtcgaggagaaaatcgcgtcgacttgttccatggtcaggtgctggatcgggttgtccttgtgcacgaacaccgccagggcatccacggcaaccggaatcgcggttggcttgtagccgtacttctgctcgaaggccgccagttcggtgtccttcatcttgcggctcatcgggcccaggttggaggtgccttcagtcagcgcaggtggcgcggtggccgagccggcagcttgaatctggatgttgacgttcgggtattcctttttgtaaccctcggcccacagggtcatcaggttagccagggtatcggaaccaacgctggacaagttgcccgacacaccagtggtcttgacgtacgccgggattgccggatcaacaccagcggccaccgcgttggcggtcgcaacgccagcagcgacaaaagtcattgccgccatcaaacgtttcagtttcatgccttgctcctagcagattgggataattggatcggggccaagtatcgggaggccgtgtgaacactctatgtctggaatgtgacagttagatgaaaggccactattgggtgaggatttgcatttaagaagaaattttcagaaatgccggcctgagcgggaagataagtgtgataaggctctggcttgaaaccatgctgcaattgctgaccggagatttcccacagctttttagggttgtcgctcggaactggccttaataacctcctcctgccgctgcaaattcagcgaccgggactgcaagcccgccgaaactatgttgggagttcataagcgcctctataatcggagcgcttttatggccgtcgctttatggcggctgtgtgcgggagaccttcgggtctgccgggatgctcctaacctcggtcttgcagacccgcgcacagctgccacccatcatctgcaagtgatgctggccgctcccattttgttaggagcttttacgatgatcaaagatagccccaatcccccgctcaattcggctccactgcacgcagacgctcacagagccatcaattccaatccgacacgttctgctgaatccaccctatctgctgatgggctttttaccgtgcgtacagatctggatgccgagaccctgctggcaaacgcgtcccaggatctcacctcggtacaagtcttggctgcaaatttggcgttcgaggtcgacggtgctgcgcgagacgtggcgctgggaatatgccggatgcttgagggaattcagttattggtagatcggacgctggatcaatttgaaactcaaaacccgatggcaaaattatgaaatccgctccggtccaaagcctggttaaagtctgagcgattcacggcgaaccttaggttgacaaaacaaaaccaaagcatagtcttgtcaacctaaggagacctcacatgatcaatgaccgaattcgccgcgcaaggttattgcgtggcatgtcgctagaagcactggcactgcatctcggtgacataaccaagcaaggcctgagcaaatatgaaaaagggctgagtaccccaaactctcagcgtcttttgcaattagcaaaggcactggacgtgagcccggagtattttttccgcactcaggcactcccactcgcgccgctcgagttccgtaagcttgcgaagatgcctcagtaccgtcaggttcaagtcgaggagcagattcgagagcatctggaacgctatatatctcttgaagagtgtttcgacccaggagatatcaagactgccgaaaccccagcgcaaatgctccctgtgtcctccttagaagaagcggaacgagcggcggatgagctccggaagtattgggatataggcgaggaccctattgctcatctgactgagcagttggaagagcacggcatcaaagtggtgatgctggatggtcctgatgattttgatggcgcttgcgcagccaccaatgacggcgaacatgtgctgatcgctctaaatgctcagagagcaggtgaacgaattcgcttcaccgctgctcacgaattgggtcactgggtgatgaaattgcctgatgatatgcccgagcgcgataaagaaaattgctgtcaccgcttcgctggggctttcctttatccagctaaaagcgtgaccggagattttgggaatcaccaacgctcccgtgtccaccctagagaactattgattgctaagcgccaatatgggctctcaatgcatgcagcgctccgtcgattgaaggaccttaagctattaggcgaaggcggcttcaagtccctgactattcagttcagtagcaatggctggcgcaaagcagaacctgaaccattaccttgcaaaccacctcagcgttttgagtctctcgttttctgggggttagcggaaggtctgatcaccaaatcaagagcggccgagttgctgcgtcgcccggtgagagctctagatcccaattttctgggctcattggagagtgcatgagccttatctatatcagcgacaccaacatctggattgatttcaggaatgcgggattgctggagcatatattcaggctgccactcactttctgctgcaccgactttgtcatgcacgagcttgaggatttcccccatgatgaactactcacccaagggttggttgtcgaatcatttgacgagggaggagtgaaaaaactcttagggcttaaggtcgaacacaataatagttccttagccgatgtttcttgctacctactagcacaaacaaccggaaggccgttactcactggcgatggaaaactacgtcgtcaggccattcgggatggactacaggtacacggcgcactttggctgctcgacctaatggtcgagcatcaagtcctcaatgctattgacgcagcaacggcgttggagcatatgctaactgatggcgcccgcttaccagcatcagaatgtcaaataaggctcttaggttggagacctatatgaagctcaacccggatactgaatatccacccagcggttgtaaacatcaccatactcaccttccaaagcagaaaacttagtttcaaaaagctccatggctttgattgcgtcagctgacggataactcatgaagcgataccccgtcattaccctaaatttgaaatatccgaatccgtctgaaattattcgactgagatgagccaaatgaattgagtccctttcatcggcgcctcggaagtctcgctccatcggcattccaaccccaatgcagtcagcatgatgtatatgactagcgttcgagtattcatgtagcaacgctgcataacctttaaacaacgggtcgccactattcgtgagaccggcaatcaaaccagtgaacccccatctgcgctcaagttcttgacgagtttttctatcatatttctgatttacttcagctcttttttctggcgaaattaaaagatccttgatgggtttccactctcggtcatcaggattcgtcacagaattcaaaagctcttgagccttactatcgtttttcaataatgaaatttcaaaaaggtcagtatcaaactcttcaattcgccgcctaaaactctcacgcgactggagtatatacaatactttcagtgtaccctcgcacaccgaacgcatgattacatccgcatcccaaagttgaccgtaagcagacaataaaaatgcgctttccgtagatcgcgctgtcgccgataaaagctcaccgagaacttgccgttctcgcttgctgaattcagaaaaagctgacactggaaccattagtggcagcaactccctcattaacaaaaccgctttttcggaccactctttctgaattttaattagtacttccgtgtacatagactactcctgaacagactaccgtccgcgcttccacagatacccacccaccaccatccccatcacgcacagggcggcaacgtagtaggccgggcccatcgggctttccttcatcagcagcgacaccaccagtggcgtcagcccgccgaacacggcgtaggccacgttgtaggagaacgacaagccactgaaacgcaccacgggcggaaaggccttgaccattacgtaaggcaccacgccgatggtgcccacaaagaggccggtcagtgcgtacagcgggaacagccagtctgggtgggccatgaggctgtgatacagcgtccaggatgtggccagcaacagtgcgcaaccagcgaccagcacacggcccgcaccgaagcggtcggccagggcgcccgaagcgatgcaacccaggctcagggtgacgatggccaggctgttggcctgcaacgcaacggtcgggctgaagtggtagatggtctgcagcacggtcggggtcatcaggatcaccaccacgacgccagccgacagcaaccaagtcagcaacatcgacaagacgatggcgccacgatggtcgcgcagcaccgcgcgcaagggcagctcggcggccagggtcttgcgttgctgcatctcggcgaagatcggcgtttcatgcaaccagcggcgcaggtacaccgacagcaggccgaatacaccgccaagcaggaatgggatacgccaggcataatccgaaacctgctcagggctataaatagtgttgatggcggtggctaccaatgagcccagcaggatgccggcggtgaggccgctggtgagagtgccgcaggcgtagccgatatggcgtggcggtacgtgttcggagacgaacacccacgcgcctggcacttcaccgccaatggccgcgccttggatgatgcgcatcagcagcaacaggaccggtgcccacaggccgatctgcgcgtaggtcggcagcaggcccatgatcagggtcggcacggccatcatgaagatgctcagggtgaacatcttcttgcggcccagcaggtcgccgaagtgcgccatgatgatgccgcccagggggcgcgcgaggtaaccggcggcaaagatgccaaaggtctgcatcatgcgtagccattcgggcatgtcgaccgggaagaagagttttccgaccacggtggcgaaaaacacgaaaatgatgaaatcataaaactccaacgccccgcccaaggcagacagcgacagggttttgtagtcgttgcgggtcagcgggcgcgacggttgcgcactgcttgcgggcacggaggacatggcaaggcttctcttatagtagtcgggacggcaagcccgggacttgcggcaggcttggcaagatagcaaatcgctcgaaaaagcacagcgttgagcgaataacagttcaacagcgcgaaatattccgcatttttacgctttatctgcgcacagaagcacagttgccggaaaaagccgcgatacagccgttatttgccgaccaaatgagcgcccagaggtcgtcgtggcgccggggtctcgatatactcggcccgtgcaagcgcaagacccccagtcttgaggggctgctgtgccaaaacgtcgttgggcacccaccagccgatttggcagagtttccctttagtacgccttacgagaaacgcatcacgcggtgtatgttggtgctgaaacgtttttttcgaagacggctatccacttgaaatacccatgaagcgttacgggtcagaggcacccttggcatgatcgaactcgaacaagaagatcctatcccgcaaggcgatctcgccctgcaaatcaccgccctgccgcgtgaaaccaacggtttcggcgatatcttcggcggttggctggtcgcacagatggacctggccggcaccgccatggccagcaaggttgcaggcgggcgtgtcgccacggtggccattgatcgcatggcgttcctggtaccggtggccgtcggcgcgcagttgtccttctatacccaggctctggaaatcggccgcagctcgatccagatgatggtcgaagtgtggagcgacgacccgctgtccagcgaatggcgcaaggtgaccgaggcggtatttgtattcgtcgccatcgacggcagcggccgcacgcgctcggttccatcgcgcgcacgttaaacctcgccgggttttgacggtcaattgccccactgcctgctattgagagtgctttgttatgccgacgccccacgttgaaaccgtgaaaatcgacgagctggactgctggcgcatccgccacaacggcgcggaactgatggtggcccaacagggcgcgcatatattcagttaccagcgcgacggcgagcagccgctgatctggccgaaccctgaagcggtgttcaagcagggcaagggcattcgcaccggcgtaccggtgtgctggccgtggtttggcgtgttcgaccgcaacccgcagagcgtcaaggcgatgcgccagagcgaccagccggccggcgcccacggttttgtgcgtacggcactctgggaattggctgcgacggaactcgaaggccatgcgctacgggtggatttgctactgccggtgccgacgggcggttttccgggctggccgcaccaggtcgacctgaaactgagcctgctgctggacgatcagttgcatatccgcctgaccagtcataaccgtggcgctgacaccgtaaccctcagccaggcgctgcacacctactttgcggtgagcgatgtgcgcaatgtagaggtcgatgggctggacggcgtgacgtatatcgataccgcggacggctgggccgagaaggtgcaatccggccagctgcgcttcactgccgagaccgatcgcatctacctcgatacgccgtcccagttgaacatcgtcgacacagactggcagcgccgcatccagctcactgccgagggctcaaagtcgacggtgatctggaacccctggaccgaacgtgccaaggcgtttgatgacatggccgatgatggctggccgggcatgctgtgcatcgagacggcgaatgtgctggacgatgtggtgagcctggcgcccggcgaaagccacaccttgggtgtgaggatcagcgctgtcgccctgtaagaacgccaatcaaaatgtgggagggggcttgcccccgatagcagtggatcagtcagcacaacggctactggtagaccgctatcgggggcaagccccctcccacattggttatatgttgccctttaaagatcggattccttgaccacccgcactttccccgcatccagcgcataggccgcatcggcaagatcgttattgaccttctccaccttcaacgtgcccgtgacccacagcggcgtgtagatatcatccagcttcagccccttgggatagcgcaccaacaccagttggttcggcggcggaggcggcacgtggatgcacgcgcctgggtacggcaccaggaaaaacaacgtgctgcggcctttggtatcagtttccaacggcaccggatagccgccgatgcggatgtccttgccattcatggccgccacggtcttggttgagtacatcaccgccggcaagcccttgctctgcttcaggccacccttgtcggtgaatgtgccttgggcttcgggggagttgtggtcgatctcgggcatggcttcgagggctttttgatccgacagcggcatcaggtcgagccagtcggtttccggcagttcgccagcgtgcgccaggccagagcccagcaggaggagtgttaacaaaagacggcgcatggagaggctcgacaagtacaggtggcgagcattctagctccctgcgcctgcgcagcgcagagagcttcgtcgcttagatcatttctttttcagcaggccgtagatcaccagcagcacgatggcgccgatcagcgcgccgaggaagccggcgccctggcctgcctggtagatgcccagggcctggccaccgtaagtggcgaccaacgaacctgcgatgcccagcaggatggtcatgatccagcccatgctgtcgtcgcctggtttcaggaaacgcgcgagcaggccgacgatcaagccgataaagatggttccgatgatacccatggcatttccctctgaatgtaggtgagctatgccaaagcctagtcaggctttggcatcctgcaatcagagagacgacggtcaccaatggttcccgtcggacttgccttattgctcggcgatcagcgcttcaaccttgaggatctgcgcttgcagcgtcgcgcggtccttgcagcgcaggttggcatggccgaccttgcgcccggccttgaaggccttgccgtagtgatgcaggtggcagtcgtcgacggcgatgactttttccacgggtggcaccacaccgatgaaattgagcatggcgctctcgccgaccttggccgtggagcccaacggcaagcctgccaccgcccgcaggtggttttcgaactggctgcactcggcaccttcggtggtccagtgcccggagttgtgcacgcgcggggcgatttcgttggccttgaggccaccgtcgacttcgaagaactcgaacgccatcacgccaacgtaatccagttgcttgagcacacggctggaatagtcttcggccagggcctgcaacgggtggtcggtactggccacggacagcttgaggatgccgctgtcgtgggtgttgtgcaccaacgggtagaagcgggtttcgccatcacgggcacgcacggcgatcagcgagacttcaccggtgaacggtacgaaaccttccagcaggcaggcgacgctgcccagctcggcaaaggtgccgaccacatcggcagcggtgcgcaggactttctggcccttgccgtcataacccagggtacgggttttcagcacagccggcaggccaatgctggcgacggcggcatccaggtccgcctgggactggatatcggcgaaggccggggtcggaatgcccaggtccttgaacatgctcttctcgaaccagcggtcgcgggcgatgcgcagggcttcggcgctcgggtacaccgggacgaactgcgacaggaacgcgacggtttcggccgggacgctttcgaattcgaaggtcaccaggtcgacttcgtcggccagttggcgcaggtggtccgggtcgctgtagtcagcgcgcaggtgctcacccaaggccgccgcgcaggcgtccggcgccgggtccaggaaagcgaagtccatccccagcggggttcccgccaaggccagcatgcggcccagttggccgccaccgattacaccgattttcatcgtcaaccacctcaggcgatgcgtgggtctggattgtccagcacgctgtctgtctgttcagcacggaattttttcagcaccgcgtggaactgcgggtgcttggcgcccaggatgctggcggacagcagggcggcgttgatcgcgccggccttgccgatcgccagggtcgccaccgggatgccggccggcatttgcacgatggacaacagcgaatccacgcccgagagcatcgccgactgcaccggtacaccgagcaccggcaggtgggtcttggccgcacacatgccgggcaggtgcgctgcaccgcccgcaccggcgatgatcacctcgatgccacgggattctgcttcatcggcatactggaacagcaaatccggagtgcggtgggcggagaccactttcacttcgtagggaatgccgagtttttccagcatatcggcggtgtggctaagggtggaccaatcggacttggagcccatgatcacgccaaccaatgcactcatcgtcgtgcctcttctctctgggcgcccgcaggcgcgtcaaaaaacaacaagccacgcgggaaatccggcgtggcttggtgtacgaattaaggccggttggaccggccgaaggccgcgcagtataccgtaataatccagataaacagcccctgggatgaccatctgtcttaagcgccaaagcggcagatttactgacttgcaggtcaacccggcggactttcaagaacatggaaacttcaccccgccaacatcgaatgccactaccgcatttgcctatgacaccgacaggcaatggcaggacccagccttatcgtgggcagcgacacaccccactgacttccccaaggacaaggactgccccatgcctgcatcggtcgagtattaccgcaccctacccgcgccccacgacatcctcaacctgacaccgcccgaaacggccacattgctgaggtcgctgaacaaaaacgtcacttacacccttggtcatatgccaacccgtccagtcagtgcgcttaagctgctgacccaggtactcacgcactccctgcccacgcccgaactggactgcatcttcttcgcctgcccgccatcggacgctaccccgcaacaaaccttgtacgagctctaccacaacctcgttctgttcaacgcgctgccctcgacctacgacgccagtacggcagtgttctacacccccggagcagacgccttgcaagccctgccgtccgactgccagacgcgattaaagatagccctgcagaacctccagggtatcgagttctacctgagtgacctcgccgacttctggcaagcccggcacgcctacgccgacatgaccaaccaggcgtacgtggcccgagccttcgcggcccagcttcagtgtgcggcatcgctcaggctggcagatggttcgctggaccatgaaagtgtcgcgttgatcacgcttctggcgtcgcctgggcatatttccggttgccatctctaccgcatcgcgtttcaggatgaagaacaacaggcgcacatccctctgtacggcgccttcctgatgacccgcactcccgccagcgcagtactcggtcaaaacccctgtgtcctttacgtgcccgggctcaagttgcaggcgttctactcgccggccctgctcagggcccacctgattgccgagttgagcgagaccagcctccaccgtctgctgccgtgtatcgaccgcaatcaactccagcgcttggaagagctggccaggcacgggctgcgggacgatcacgtcagcctgtcaccgatggtgttcagcccgcacttctatgaggacgtgaccctggcgctgatcaaccagcaacgccgagacatccggcacgcgtgggcatgggcgcagcctcggcatttccaggaggccaattggatcaaccgtcacatcgaggccgcctcggacctcaggtcattgatgacccttgaaagcaccttcaaagaccacacgacacccgccatcgcggcgtttgaacgaaaactgccgccccgcccagcgcccattcctgaacctgccgcgccgaagccgatcaacctgaacgtctacatccatcgtgatttgcacggcgatagccggctgtcgtccctgcgcgaagattatttttcctggctgcaaaccgagctggaagacctgtccggccggacagtcatgatcaccttccatcaggaaaccgggccagttgctttaatcgatttcaattacaaaggggacgaacaaaagagaagctctgcctggaaaaaaacggtgctccagtacctgcaaaacctttcgaccacccattcaccgcttgacctgtacctactgctgacaggtgacaacatcaacagtagagtcgccggcattgctaatgtgcgtggaagcttcggcattgccgcgacaacgtcataccgcatcgcagcccatgaagtcgggcatatgctcggcgcgctgcataaagacggcgacaatattttcaatggctggtggcacgaaaccctgatgaagaatcgtgactttttctcgttcctgaggggcaacgcctaccggttcagcgacaagaaccgggacaatatccgcacctacctgagccagttcgattgacgcacggctatacggcggggctcgccgccccgccttcgagcttgcgccacagcaaccgcacgttcgccttgcgtaccaaggcacagcggtacaggcggatttccagcggcacatgccattgcggcccgccgcacaccaccagctcaccccgcgccagctcggcgcgcacgctcaactgcggcacccaggcgatgcccaggccttccagggccatgctcttgaggctgtcggccatggcggtttcgtacacggtggtaaagcgcagcgcacgctgacgcaacagcaaattcaccgaacgaccgagaaacgcgccggcgctgtaggccagcaatggcacgctgccctcgccttccaggtcgaacagcggtttgccgtcggcatcggcggcacacaccgggagcatttcggtattgcccaggtgcagcgacgggaagatttccgagtccatctgcatcgcggcgtcggggtcgtagaacgccagcatcaggtcgcagccgccctcacgcaaagcatgcacggcgtcaccgacgttggtggccaccagccgggtggcgatgttcaggccttcgttgcgcagttgcgcgatccagcgcggaaagaagcccagggccagggagtgcgccgccgccacttgcatgacctcgccctgcccgccttccaggtgatgcaaatggcgcagcacttcaccgagctgctcgaccacggtgcgcgcggtgaccaggaacaactggcccgccgccgtcagctccaccggcgtgcgcgagcggttgaccagggtcaggcccaacgcggcttccaggctgcggatgcgtcggctgaacgccggctgggtcacgaagcgccgctccgccgcctgggaaaaactgcgggtcgccgccagggcgctgaagtcttccagccatttgctctcaaggttcattgctgcctcccgtgggtacgcaccattttggcacacacgcccgccatgataaccgggtcacactcacattatgccgtttgtgcataggccagtgcttaacagcattggcccaaaaagttctacaagcctagcattcgcagcgttccggccagttccgggtccatatcgagatgatttccgtcatgtcctccgctgcatctttccgtaccgaaaaagacctgcttggcgtactcgaagtaccggctcaagcgtattacggcatccagaccctgcgagcggtgaacaacttccgcctctcgggcgttccgatttcgcattacccgaaattggtggtcggtctggcaatggtcaagcaagcggcggctgacgccaaccgcgagttgggccagctcagcgaagccaagcacgctgccatcagcgaagcctgtgcccgtctgatccgcggcgatttccacgaagagttcgtggtggacatgattcaaggcggcgctggcacttcaaccaacatgaatgccaacgaagtcatcgccaacatcgcgttggaggccatgggccacaacaagggcgagtaccaatacctgcacccgaacaacgacgtgaacatggcgcagtcgaccaacgacgcctacccgaccgcgatccgcctgggtctgctgctgggccatgacgcgctgctggccagcctcgacagcctgatccaggcgttcgccgccaaaggcgtcgaattcagccatgtgctgaaaatgggccgcacccaattgcaagacgccgtgccgatgaccctcggccaggaattccgcgccttcgccaccaccctgggggaagacctggcgcgcctgaaaactctggcgcctgagttgctgaccgaagtgaacctgggcggcaccgccatcggtaccggcatcaacgccgacccgcgctaccaggccctggccgtacagcgcctggcggtgatcagcggccagccggtcgtgccggctgccgacctgatcgaagccacctccgacatgggcgccttcgtgctgttctccggcatgctcaagcgcaccgcggtgaagctgtcgaagatctgcaacgacctgcgcctgctgtccagcggcccacgcaccggcatcaacgagatcaacctgccggcacgccagccaggcagctcgatcatgcccggcaaggtcaacccggtcatcccggaagccgtgaaccaagtggcgttccaggttatcggtaacgacctggccctgaccatggcggccgaaggcggccagttgcaactgaacgtgatggagccgctgatcgcgttcaagatcttcgactcgatccgcctgctgcaacgcgccatggacatgctgcgcgagcactgcatcgtcggcatcaccgccaacgaagcccgctgccgcgaactggtggagcactccatcggcctggtcaccgcgctgaacccgtacatcggctatgaaaacgccacccgcatcgcccgtatcgccctcgaaagcgggcgtggcgtgctggagttggtgcgcgaagaaggcttgctcgacgacgccatgctcgacgacatcctgcgccccgaaaacatgattgccccacgcttggtcccgctgaaggcctaagcgtttgttgcaccgctcaccaggttgagggactagacacctctcaccttttgagggcctgaaggctcgttcttcaggcccttttttttgccccgaggttgtgaaatgaagcctataaaaacgccaatatcgctctgtaagtccaccacccagctgaaacctttaatcgccccgagcagacggatcacgttcgcctaggtatagtgccgcccctcttcgcgtcagagatcgtcggtaacgaggtcctggacagcgcgaaaccgcatgaataacaacacccgcaaaaggattggggtcgaagcgtcgtgcactgcctggtgctgagcgatagcgtcgaaccgtcctgcgtttgccattagaaaaatcagcgaggaacactccatgctcgaagtcatcaacgacttcctctcagggaaagtactgatcgtgctcattgtcgggctcggcggttatttcacgattcgctcgcgtttcgtacaactgcgtcacttcttccacatgttttcggtatttcgcgacagcctgaaaaacagctccgatcagctcagctccttccaggcgctgatgctcagcctggccggccgcgtgggtgccggcaacattgccggtgtcggtattgccgtgacactgggtggcccgggcgccgtgttctggatgtgggtcaccgcgctggtgggcatgtcgtcgagcttcatcgagtgctccctcggccagttgtacaagcgcactgacgccgagggcaccttccgtggcggcccggcctattacatccagcacggtttgcacaagcgctggctgggcatggtcatggcgttcctgttgctggtgaccttcggtttcgctttcaacggcctgcaagcccacgccgtgacccactcgctgaacaacgccttcggcctggacaccacctacaccggcctggccctggcggtactgctgggcctggtgttcatcggcgggatcaagcgcatcgcctcgattgccgacctgctggtgccggtcaagaccctggtctacatcgccgtaaccctctatgtgatcgtgctgcaattcgaccatgtgccggccatgctcgcgaccatcgtcaagagcgccttcggcctcgaccaggccttcggtggcctggtgggcagcgcgatcatcatgggtgtgaagcgcggcgtgttcgccaacgaagccggcctgggcagtgcgcctaacgtggcagcagtagcctcggttgagcacccgatcgcccagggcgtggtccaggcgttcagcgtgttcctcgataccttcgtgatctgcacctgtactgcattgctgatcctgctctccggcttctacaccccgggctttgaaggcgacggcattgccctgacccagaactccctggcggcggtggtcggcgactggggccgcatgttcatctcggtggccctggcgttgttcgtgttcacctcgatcatgtacaactactacctgggcgagagcaatctgcgcttcctggtaggcaacaaccgcaaggtgctgatgggctaccgcgccctggtgctggtgctgatcttctggggttccatcgagaacctgagcaccgtgttcgcctttgccgacatcaccatgaccctgctggcgttcgtcaacctgttcgccctggcgttcctgttcaagatcgccatgcgcatcctcaacgactacgacaaccagcgcgcagcgggcatcaagaccccggtgttcgactccagccagttccctgacctggacctggaccgcaaggcctggccggccaacccggtcaagcctgagccaggcactcaagcaagcgctgaactgaacgctcaagcgcaacgctgagcgtagatagatgacacgccgcccggccttgggcatgctctgggcccggcggcgtttttcgttcaggagaaaattcgatgtccccagctaataacgtgatggtgctctacaccggtggcaccatcggcatgcaggccagtgccaacggcctggcgcctgcgtccggttttgaagcacgcatgcgcgaacagcttgccgacgtgcaagtgcccacctggtgctttcgggaaatgtcgccgctgatcgacagcgccaatatgacccccgcctactggcagcgcctgcacgccgccgtggtcgaagccgtggacaacggctgcgacgccgtactgatcctacacggcactgacacgctggcctacagcgccgccgccatgagcttccaactgctcggcctgccggcgccggtggtgttcactggctccatgctgcccgccggtgtgcccgacagcgatgcccgggagaacgtcagcggtgccttggcggcactcggcgaaggcctggcgccaggtgtgcagttgttcttccacggcgcactgatggcgccgacccgctgcgcgaaagtccgcagctttggccgccatccgtttgctgccctgcagcgcaatggcggcgtcgcccaggccgaaatgatcccggccgccctgcattaccgccagcccaaagccgtggccaacgtgggtgtgctgccactggtgccgggcatcgccgccgggcaactggatgcactgatcgacagcggtatccaggcgctggtgctggaatgcttcggcagcggcaccgggccgagcgacaacccggcgttcctggccagcctccaacgagcacaggatcaaggcgtggtggtggtggcgatcacccaatgccatgaaggcggcgtggaactggatgtgtatgaagcgggcagccgcttgcgcggcgtcggcgtgttgtccggtggcggcatgacccgcgaagcggtgttcggcaagctcaatgcactgctcggtgccggactcgacaccgctgaggttcgccgcctggtggaactcgacctgtgtggcgagctgagctgatcggcctgtaacttgcttcccttccagccatcccctggctggaagcaccccatgctgcactcccacctgaccaccctcaacgccgtatccctggtgctcaacgccttcaaggccgaaggcttgccggcccaggaactgctggccggcagcggcatctgtgcggcggacttgagccgcgccgacacgcgcatcaccaccaaccaggagatgcgcgtgtgcgccaatgccgtggcgcggcgccgggatatcggccttgaactgggccggcagatgcatgtatcggcctatggcatgctcggctatgccctgctcaccagtgccacctttggtgacgccttgcgcctggcgttgcactacccggcgctgttgggaacacttttcgagttgagcctggaggaagacggccagcgcgtgtggttcaccgccggtgattatcgagaagacccggcgcttgagcgattcaatgtcgaactgtgcctggcctcgctgaaagtcatctgcgacgacctgctgggccagccactgccactgctcggcgcacgcttcgagcacgccgccccggactaccgcgcgcgttataccgaacgcttcccttgcccgttgcagttccaggccaccgccaacgcgtttgccttcgaccggcactggctcgaacaaccgctgccgctggcagacaccgtcacccaccaggccatggctgagcgctgccgcaaacagaacctggagttcaccgggcgccaggcctggctgggcaggattcgccagttgctcactgcgcaactcaacgccgcgccgggcctggaaggcctggccatgcagatgaactgctcggcgcgcaccctgcgccggcatttgcacgacctgggttgcagctaccaggagctgttggacgaggtgcgtttcgagcgcgccaagcaactgctggctgaggaccagtggccgatctaccggattgccgaagcgttggggttcagcgaaacggccagtttccggcatgcatttgtacgctggagcggcgtggcgccgagccaatttcgagcatgatgcgccattgaggggcgaattacggacaaacaatttggccatattcatccccttttggccgctcctgccgttctcttaaaccgcgcccaccgcaagactgcaggcaccgacccagcctgcggagaacaagaatgctgacgatctattcggacgatcaccacctgcaccacggccgctgcgaactgatggacgggcaactgatgccctgcttcgaaatgccctcgcgggccgaccatgtgctgcaacgggtcaaagaccgcgaactgggcccggtgcaggcgccacaggactttggcctggcgccgttgcaacgcatccacagccgcgattacctggacttcttcaaaggcgcctgggcgcgctggaccaaacacggccaggacggcgacctgctgccctacacctggcccgcgcgcaccctgcgccgggtgctgcccaccagcctgcacggccagttgggctactacagcttcgatggcggtgcaccgatcactgccggaacctggcaggcagcctactcggcagcacaagtggcgctcaccgcacagcaggcgatccagcacggcgcccacagtgtgttcgcgttgtgtcgcccgccggggcatcacgccgccagcgacttgatgggcggttattgctacctgaacaacgcggcgatcgccgcccaggcgtttctcgaccagggccaccgcaaggtcgcgatcctcgatgtggactaccaccacggcaacggcacccagtcgattttctacgaccgcagcgatgtgctgtttacctcgatccacgggcatccggaggccgagtttccgttcttcctgggctatgccgatgagaggggcgaaggcgccggggaaggcttcaacttcaactacccgctgcccgccggctccggctgggacacctggagcgcggcactggagcaggcctgccgggagatcgaacactacggcgccgacatcatcgtggtctcactgggcgtggacaccttcaaggatgacccgatctcacagttcaagctcgacagcccggactacctgaccatgggcgcgcgcatcgcacgcctgggcaagccgacgctgttcgtgatggaaggtggttacgcggtggaagaaatcggcatcaatgccgtcaacgtgctcgaaggttttgagaggtcagcccaatgaacatgctcaagtcgcttgtgctctgcgccgccgtgctgagcagcgccgcgtacgccgaagaaaaaaccctgaaggtgtataactggttcgactacatcacgcccaaggcgctggaggacttcaaggcgcagaacccggcgatcaaactggtctacgacatcttcgacaccaacgaagcactggaggccaagctgctgaccggtaactccggctatgacgtggtggtgccgtccaacgtattcctcgccaagcaaatcgaggccggcgtgttccagcccctggaccgcaaccaattgcccaactggaaccacctcgatcccaagctgatgaagctgatcgaggccaatgaccccggcaataaattcgccgtgccctacatgtacggcaccatcctgatcggcttcaacccggccaaggtcaaggccgcgctcggcgacaacgccccggtggacagctgggacctgatcttcaaggaagagaacatcagcaagctcaagcaatgcggcgtggccctgctggactcgccttcggagatcctgccgctggccctgcagcacctgggcctggaccccaacagcagcaaccccaaggactacgtcaaggccgaggcgctgttgatgaagatccgcccgtacatcacctatttccattcgtccaagtacatggccgatatcgccaacggtgacatctgcgtggccgtcggttattcgggcagtttttcccaggcggccaaccgggccaaggaggccaagaacggcgtagtcgtcgacatgcgcctgcccaaggaaggcgcgccgatctggttcgacatgctcgccattcccaaaggcgcgcagaacccgcaggacgcctacacctttatcaactacctgctgcaaccccaggtgatcgcgccgatcagcgattttgtcggttaccccaacccgaacaaggacgccaccgggcaggtcgacccggcgatccgcaacaaccccaacctgtaccccaccgaagcagcgatggcgaccctctataccctcaaacccctgggccgtgatgccgagcgcgccaggacccgcgcctggaccaagatcaagtccggcacctgacgggcctacataaacaccgcctgcctgactgcgcgctttctagcatggctacacccggggcctggcctcgggttttgtccatcccacgcatgtcaggctcccctatgacttcaacccaaaaagcctctgccacgcagcagccgccgcgctactactccaccgccaccttgatcactcaactgtccaccggcccggcgtttcgggaagtggccgccgtattgctgcgacgtgaactcaaggcgcattacccgaacctggatatagacccgaacatcaccctggtggaattggccgatcgcgaatcggtgtccaacgccgacgcacgctgggccaccttcaagcacaccggttggttgatcttcaacgcggccttgccattccttggttcgacggtgggggggcgcggcgtggatctggcaaatcatggatcaactgcaagaagtcgtggaggccgaaggcgacccgcaacaccgctcacgctggagcgccatcgccgatctgctgctcaacctgggcatggcgatcacgttgcaccgcgtgaccctgcgcccgttggagtcagagcctcccaccctcgccaagctacccaaaccggtcgagcccaagccggtagaacggattgacttctacctcagcgagatcggcctggagccggcgagccggctgtttttcgagaagaaaaagacctgattccgccgttacttatctaccgtcccagccactcctgctgtcgctaccgtgcgcgttcgctgttcgccctggccaacgacagaaggagccgccaatgtccaaaaacgcgcacaacaacaataaccacaccctgaacgggcgccccaccaacgcctacgaattactcacccaattgaccaccggcccgtctgcccgggaagtggcgtcctacacccttcgctgggtactgaaggagcagtaccccacgctcaatatcgacccggacctgacgatgatcgtcactccgcgctggcatgttcttgagtcggtcatcatgccggttccgccccacgtcgaatccatcacgacggtgttggcacgccagatgctgtcgcccacccctgtgttctaccttgagggcgagcacttcctcacgctgcatcctgagtcccccacagccgtgcacttgccggtgaaaatcgatgccatcgcacgcctgatcaatgagttggccggcctgctgttcgccgccttccaggagcgccaactggactactggaatgcatcgaacggcaacagttggccgcgttggcagaccttctcccattcattgcgcaagtcctggaatgtcaccaccgttgaagactgggatgtgcttgagtgtgaaatggccagagggctttatcggtttccattgcgcgcccaacgcagggtcaaggatcgctacaacagccgcgcctacgtggtggatgtcagcctgctgcgcgacgacgtcaccgtgcatgtgggggtgctggatatggcggtgctgatgggtgagttcaacgaacagacgatgatcctggcgtactcactggtcagtggctacgagcgcttcggatctctcgaagagctgggcaaggcactgccggccaaggtcgtgcaactgcaatcggatacaacattgcagtggaagttgtacgagcccgccgacagctttttcgacagcctcgcctgtgccctgatagccatgcaaatccaagccatcggtgaggccgagaggttcgttgccgcttccaccgcaccgcagcctgagatgccaaccactctctcccggattgtgcccagcattgaagacctgagcgaccatgcgctctcccatatccgccagatacatcaacaaatgccggactggctggccaatgcttcggaccaggacatcgccctctacagccgctacatcattgaattggcacagatccacgcgttcaacgaaggccgttcttttcaggacggaatcccgccaatacgcgactacgcccttgagaagctgcaggagcagatccgcgctcacaaagaaggtgcacacctgaacctgaacaaggttgcagtgacgatccagagcccagtgatctggggcaccttcgcaataccgggcgaggtggatgtgacccagcgcagcctgatcgacctggtcctagagaacctcaccggcctgcccaccggccaacccacggtgtactacaacggttcagtggcgccgcaatggttgaacttcaggttcctgaaggaggtgatcggcacagtcgatatcggcgaacactacccggcgctgatcaagagcacgttgctcgacgacccggtccagtcaagggccaggcaattgctgtacatcagtcatttacgcgtgcaactgccactgttggctctgcaattgaagatccagcaacgccagggcatggacgaactcggctaccgctatgtcgccgcagtgatgcaggtagagaagcaagaccagcaggttgacgggcagccgatcgtgatccgaccgcttgcctttgtcccgacattgcgcagcggcattcagggggatgaagtcgccaatatgtttgtgatcggcccgctggacccttccgccggcccctgcgtgctgtaccgccccttgctcgaaccagtgcttgcccagttcccatcccggcaaaacctgctgtacatgatcaagcaggaccaagacctgcgcgaatcagtgctggcctggttacccgaagacgtccgcttcaactacgagcagtacgtgtttcccgacaccctgccgtcgccttggaccgttgtgcgagtgattgtcgagccggcgacggtggtggatatgagcggacctatcgaattgagcgacgacgtgttgggcgacggcgccctgatcacgctgttcaaggccaacgccaacgcgatggtcgagttggcgacccgtcaatcgatctccaatgagcagaagcgctgggcgacctttcgccagaccggctggcagatcttcaacgccgtgctgccgtttctggggcctaccgtgggggttgccgcgtggatgtggcaaatcatggaagacctggagcaggccgagcaggcggtggacaaatccgacaaatccgagggctggaacgcgctcgtcgacctgtggctcaacctcggcatggcattggccctgcacgtagggctgcgtcatccaacccgtgagcccgtgaccgaaccctccaaaccccggcttgaacccatccccgagaaaccgatcaagcccaaagacccgctaccgcagccccccgtggtcgccaaccagcaattgccggacctgccgggcaccgacctgaccccgttacaccaggaaaccctgcatatcagcggcgcactcagtcgcgcgccttcgagcctgggtacacggctggacacattcaaaaccgacaaacccgccacccttggcgagcagaacagaacacccggcgttcatctgcatctgtatccggacaaggacaagtggtacgccccggtcggcgagcgctggttcgaggtcaatctggacgacaacgacaacgtggtcatagccgaccccaacgaccccgcgcgcactggcccgttgctgatcagcaaccggtccggccaatggttcgtcgacgtacggctacgcctgcgcgggggaggctttcgcaatcggcggcgtgccgctcaggggcagaagccgcagcgcatcactgagctgaggaaaagcctcactgacttcgatgccaacgagagtcgtcgccaggcggagctttccgaatccctcgctgccatcggctccgaacctggcccctcgaccgcgcaaaggcgcgatgcctatatcggcgacgtcgaccggcggctggaggaatacgacgtgccaatccgccaactcacggcactgggcgttatcgacacggtgcccaactaccagatcgccatggtcgattatttgaacaaacagttgctgctcacccgctccgccgtcgaggagcgcctgcgcccctatcgagacaccttgctcgatacggtcggcttgctggacgaagcaacctccgagatcccccagagcaccaccgatctggcccaggaaatgtccacgctgaacctggaaatgatcagccgcctggagtacgtcgactcacgcttcaaggaactttcgaagctgggcagcgccggtgcgcaggtgatgcagacaacttccaaggcactgcccaacctcaacctgcacgacctgaaagccttgcaaataatggtgtcgcgcttcctgtgcatcaaaaacggcaacgcgccggaacagcagcaggcacgcacccagctgagcaccatcgtgggtatggccgacctcgctgtgcagagttacctcgataccctgcaaaacgatgccgacagccccttgtcggagcgtatcgaggtgctcgatagcctcgtcgaccaattcaccactgtcgaccagcgcctgcttgacctgcatgccgatgcacccgaacaggtgctcagggaaccgctcaacgacctgttacaactcgtcgacgaattcaaccaacgtgcgactcacgacttggcgcgactgttgcgcgaacgcaaggcattggagcccaagccaggcccctctcggcccgcaccggtggcacctcgcaaggtcatcaagacacgctttcacggcgttgtggtcggcgagccacgcgagtcggacccttccctggtagatgtcaaagcaccgctgaccggcaaggtgatagccaccttccatgaaaaatcgccggggcagtgggcgcagcgggtcgaggagcgtacccgcccgccagcctcgaagccgatcagcttggacaccagcctcaaagagggccaggcgcttctggatgcaatacccgccacaatcaaacgtcttgagggccattccaataaaccctggcgcctgccgacagacatcgaagggatgtttcacctggaggtgtcgccccttgagcgcgcgattgaaaacatcgaggaggccctcacccaacgcaatctgactgaaatcgaccaccccgccgcggcccaactcaagctcaagctcaatgcagccgtgcagcagctttacgaagagggcaaagccacgcgcatcaggatgatcaaggagcaggttcccgtcgcatctcgtattcagtggctgtatgaacagggcgaggtgatcgtcaggaaaaccctcacgcgccgacgcctcaaaagccgtagagacttcctggacgaatacggagtccacgatcgcaagacccaggccgtattgtggtatgcgcactttcattaccactcgatgcaggcaggtagcgaagacttcgtcgccgggcacttcaagaccgttgcgcaacaaaaactcgggggtgcctttcagaccacagggctctcagacaaagagcagattgccattgagcgcgcagccattggcaaaccattggccaagtcgatgtttttcaacacgcacccccacagcgaaacctgagggctcgctcactgccataccctgcgcaagcgctccagcgcctggacaatcgctggctccggtacggcggcgaaccccaataccaggccggcacgctggtccgcaggcgggctggattgcgccagccaataactgctcaggccattgatttcaacctcagcggcccgcgccagttcgagcaactgctgctcgcgggccaggctgtccacgcgcaccgtcagatgcaaccctgcggcgacactgggcaactcgccgacaccggccaacccgcttggccaacccgccagcaaggtattgcgccggctcaacgcggcacggcgcatgcggcggatatggcgctggaaatgcccagcggccatgaattcagccatcaccgcctgggtgctgacctcggagtggcgcatgtcgacggcacggcgccgggcgaacgcatccaccaggcccgccggcaacaccagatagcccaggcgcaacgcagggaaggcgaccttgccgaaagtaccgacatagagcacgcgcccactgcgatccagcgcggccaggggcgacaacggtgcgccgctgtagcggtactcgccgtcgtagtcgtcctcgatgatccaaccgcccgtacgctcggcccaggcgagcaactccaggcgccgcgccaggctcatcaccacccccatcgggtactggtgggagggtgtgacataggccacgcggcaatcgctcaaggtattgagcacctgacaatcaatgccttcgccatccaccggcacgccgtgcaatttcccgcccgccagggcgaacgcatgcccggccgcacgatagccggggttttccaccgccacgccatcaccgggctccaccagcaactgtgcacaaaggctgatggcctgctgcgcgccactggtgatcactatttgttcagccgtgcaatgcatgcctcgtgagctgcgcaagtaggcggcaatcagaccacgcaggcggccgtcgcccgcggggtcgccgtagcacagcagttccaggtccggattgcgccagaatgccccgttcagcttcgcccagacctcgaacggaaacagatcgaaggcgggtacacccacacgaaatgcccgtggcggccccgctggcggcagagacaggtggttggtttttatccgcgccaagcccgcgctgtggataacttcactgtcgaggtcttccggcaaatccgcccattttgtggataaggttggggataagcctgttgaaaaccctgtggatacttttgtggatagtttttttgcgctgggtaattgggccacataggtgccatcgccgacccggctttcaataaacccctccgcatacagctgatcgtaggcgcgcaccacgctgttacgggaaatcgataacgccgccgccaggtcacgggtggccggcaaacgcgtcccactgaccaatcgcccgtccagcacgcgctggcgcagggcgtcatacagctggcgcgtcaggccttgacggcgatccagctcaattccggcagggttgaacgacaggggcggcgagacaggcgacatattggacctatgaaatgggtgccagatggctctttcaacgagccattagcctgcctaggatgcaggcattcgccaaggaatatttccatgtacacacctcgcgcctttgccctcgacgatttgcccgaactgcagcaactgatccagcacacccgcctggcgcaactggtgacctttggcgagcatggcctgcaagccagccacctgcccttgctgctcaaccccgatgaaggcccgaacggcacactctacgggcacctggccaaagccaatgcgcagtggaaagacctgcagaacggcagcgaagcgctggtgatcttcgcgggtgccgaggcctacatcagcccggcgttctacccggccaaggccgagcacggcaaagtcgtgcctacctggaactacatcgccgtgcacgcctatggcaaagccgaggtgttcaacgatgccgagcgcttgctcgcggtggtcactgcgctgaccgatcgccatgaaggcggccgcgaccagccctggaaagtcagcgacgcgccggccgactatatcgacggcatgctcaaggccatcgtcggcttcgccctgccgatcgagcgcttgatcggcaaacgcaaactcagccagaaccgcagtgcggccgacatgacaggcgtgcgtgcgggcctggcaaccagcgccgatgtgcgcgaccagaccctcgcccgttttattccccaaggagccccagaatgagcccgatcgacatccgccaagtcaccgccgccgaccacgctgcctggttgccgctgtggcaggcgtatttgaagttctacgaaaccgaactgccggacgccgtcagccaaagcacctggcaacgcctgatcgacgccagcgagccgacccattcggccctggcctggcaggacggcaaggcggtgggcatggtcaatttcatctaccatcgctccaattggagcatcgagaattcctgctacctgcaggacttgctggtggacccggcccaacgcggcaccggcgtcggtcgcaagctgatcgagttcgtctacgccaccgccaaggccgatggctgcgccaaggtgcactggctgacccacgagaccaatgccaccgcgatccaactctacgaacgcatcgccgaacgccctgggttcatccaatttcgcaaaggtctttaaggagcgcagcatgactacttccctcgccgactggaaaggcgtcccggccccaaccgtcaaactgcttgaagggcgcttcatccgcctggaaaaactcgacccggcccgccatggcgacgaattgttccaggccctccagggccccggtgccgaccccaagctgtgggactacttgccgtacggccctttcccggaacgcagcgccttcaatgactggctgaacaaccacgcggcccacagcgacccgtacttcttctgcgtggtcgaccgccagaccggccaggtgcaaggcctcctcagcctgatgtccatcgtccccgcacagggccgtatcgaaatcggccacgtcaccttcggcgcaccgatgcagcgctcgccgaaaagcaccgaggcggtgtacctgttggccaaacacgcgttcgaccagggctaccgccgcctggagtggaagtgcaacaacgccaacgatcgctccaggtacgcggccgagcggttgggcttcagtttcgaaggggtgttccgccagcacatggtggtgaagggcaagaaccgcgataccgcgtggtactcgatcctcgattcggagtggccgaaggttggagcggggtttgagaagtggttgtcgcaagagaatcagcgcggggatgggcaggtgaaaacattggcgcagtgccgtgcctgaatcgccaacactgcgttgatcaatgtgggagccgggctcccacattgggtcttcagtgccagcgccgttacctagaggtttctgcgcaccttcactacccccatcttcaatccgaatggccggaacactgcattcagcgatttcagtgtctgattgccttcgccatgctcgatatgcaccaaggtacgcacggagattttgcacatcctggcaaactggctttgatgcaggccggtgacttcggtgcgcaagcggcgtaccgcttcggcgatttccagtgtgccttctgccaaggcatcctgaatgctttcaatcaacagggtgcgttcttccacggtcaagctcatttcagtccccattctttcaaccgctgcggcagatgtttcaacgcaatgccgggatggttcattgtcactgcaggcaggccgctggcattgagtatgtctggcagggctgaaagctgttgcgcggcctccctcaggtcttcgaacagctgctcgctgtcgacaagatcacccagcaaatgacatacaccccgccaatccacgtcgcccgcccgctccagctccctgggccatttggtcgtgcgcgtgatgccttcgtcgtccattaccatcggcgccaaatcgtagatgggtgcaagacgcagggcgttcgcttcgcgaatgatcgaggtattgcgaccatggttgtccgagttgccgaggattttgttcaacagatcgcgcttgagatactcagcgaccaaccccggtacttgattggactgaccagcctctcgccacaattcaaccaacaacgtcaccacctcacgatgcgccatggcgctgcctggcaccgtgacacccgccaatgagtagattgactccacggcatagcgttcgaccccctgcgcagtgacgcgccgatcaaaacggtgcatccacacactgggcttgctcgcttcctccagtgataaccccgactccgccacggtatcaatacccaaggcctgcaaggctttgtagtagtggaattcgctacgcaggatgtcctgatccgtctgtgtgcctttgttgcgtgcaaacttcacaaaccaatgctgcttgacctgctcgtcgtccagcaccgcatccgggaataacaaaccgtccaggttttctgtcagcagtaactttggcgcctccccgcccgcccccgtggctccgccgatagctgcgccttgctcataggcatactccaggaaacggttatcccgccggataacctcatgacgttcaaaccccatgggggttcgattgtccaaagcctcaaccgattctttgattcgcatatgtccaatgggggcaggcgtactgcgcatcagcagaaaaaggtctgcactgatgtcatctggtttatccccaccaatacgcgccatcagaaaacgtttagcggcacccgcaggtgcgatgtcatgtacaaaagcgggagcatgctgggctctatcaccctcccattgcagtgggaacgcggcactcaccgaagtggcgaagggtgtcgccagttcatcaaggtgttccaccagatagcgctggtcataaccaaaactgcaccgactttcgaaacccagttgcggcgtatcaaatgtcaggagcatggcgtcctgccactttccttcagcgtagatttgtagtgtcagacagaccatggctctcacctgcaatttaatgcattcaccagctgaaaaggtgaactgaaattgcaatatagtgcagatacggagctcacgcacccactatgaacgcaataaaatgcagattcaaaaaacatcgagcaaaggaagatgagtttttaatcgccccgtactagagacaactcccgcaaaccaggggtcgatggcctgacagttatcaccccaccatctcgctaaattcccggcctcattcatcagaggttgggatttcatgccttttacaccgcacagagttgcccttgtcattgcccttgctctcagcgccgccagccttcaaaccgcacaggcgcggggcgatatcgaatacacgccgtactggtatcaaccctacgatgcacttgatgacgcgtgggtctacgtgcccgaaaccaaagcggcgcccctcgacggttatctcacccgcaaggccacttcgcacaatggcttgcaagtggccaaggtgctggagcccgcgctgattcgtttgctgcagtccggggagctgactgccgagcagatcaaagccctggagaaattcggtgatgcgctggagaaacagcctggcggaatcggtgccagccttgagcaattggctggcagccagaacgccaacctcgcgggcgcaacgcaaaacaccacgcagcaactcggcaaccaattgatttcaaccctgcgcacactgcccgccgacgacgaaggacacttctgggttcaaggcctgggccacgacggccgcctcgataaacaaggcggcagcgccggcttgaaatacagcaccgaaggcctgctgttgggcgccgactgggcactggatcacgcctggcgcgtaggtgtactgggcgcaaaatccaccagccatttcgacactccacgcttcgcctccgagttggacagttggcacctgggcggttatgccgtacgccgggacggcccgctggccctgcgcctgggcgcgatatacagcgaccatgcggggcagaacaaacgcaacgtcaacctgctggattacaaggagcacctcaggggccaatacaacgcccagagccaaaccctgttttccgagctgggctatcaactgggcagcacggatctcagcgtggaacccttcgccggcctcggcttccagcgctaccaccgcgacagcttcaaggaaaccggtggcctgaccgcactgaacgtagatgcacaaacccagcagaacttgagcagcatcgtgggccttcgcctggcaacggtgtatcgattcgataaccaggtcagcctcacacctcatctcagcaccggctggaaacacctctacggcgaggtcgaaagccaggtgcgccagtcctaccgcgcattgccagggcgggttgacggcttcacggtccagggcacttcgctggatcgcaatagcctggatctgcaagccgggctggacctggccctgtcgacacaacacaccgtcggcctgacctacagcgcccaggccggtaccaacagccgtaaccacggcctgatggggcaatggaagatgagcttctgacccaccaaactccaggcaaaaaaaaggggggcacctgcccccccgaggattaaacggtcgtgtcgaaggctgtatcagccttcgatctcaatcaggatttcgccagggttgacccggtcgcccttggccacatgaacggcggtgaccttgccggcaatcgcggcctgtacttcggtttccatcttcatggcttcggtaatcagcacggcctggccggccttgaccacgtcgccttccttgaccagcacatcgacgatattgcccggcatcgctgtgctgacatggcccggcgcggtagcgtgcttgcggttgctgctgccgccgctgacgaactcattgagcggttcgaacaccacttcttccggcatgccgtcgatggacaggtagaagtgacgcttgccctcggccttcacgccaacaccggtgatgtccacgcggtagctttcaccgtgcacgtcgatgacgaactcggtcggcacgccttcgccaccggcacgcgccacaccgccggcttcagggatcggcagcagcacttccggcgccagggtgccggcgtcgcgttcttcgaggaacttgcgcccgatgtccgggaacatcgcgtaggtcagcacgtcttcttcggacttggccaacgcgccgatttcaccgcgcagcttggtcatttccggcttgagcaggtcggccgggcgcacgtcgatcacttcttcgctgccgatggcctggcgccgcagtttctcgttcaccgtgcccggcgccttgccgtagccgccttgcaggtagagcttcacttcgttggtgatggtcttgtaacgctcgccggccagcacgttgaagaacgcctgggtgccgacgatctgcgaggtcggggtgaccagcggcgggaagccaaggtcttcacgtacgcgcgggatctcggccaacacttcgctcatgcggttgagggcgccctgctctttcaactggttggccaggttggaaatcatcccgcccggcacctggttgacttgcacacgggtgtcgaccgcggtgaattcgctttcgaactggtggtacttcttgcgcacggcatagaagtacaggccgatctcttgcagcagctccaggctcaggccggtgtcgaactcgctgcctttaagggcggcgaccatcgactcggtccctgggtggctggtgccccaggcgaagctggagatggcggtgtcgatatggtcagcaccgttctcgatggccttgagttggcacatcgcggccaaacctgcagtgtcatgcgagtggataaagatcggcagactctgctcggccttcagcgccttgaccagctcgccggtggcatacggggtcaacaggccggccatgtccttgatcgcgatggagtcgcaacccatcgattccagctgcttggcctgcgccacgaaggcttcaacggtgtgcaccgggctggtggtgtaggcgatggtgccttgggcatgcttgccggcggctttcaccgcttcgatggccacgcgcaggttacgcacgtcgttcatggcgtcgaaaatgcggaagacatcgatgccattcacagccgccttggccacgaacgccttcaccacatcgtcactgtagtgacggtagcccagcaggttctggccgcgcagcagcatttgcaggcgcgtgttgggcaatgcggcgcgcagtttgcgcaggcgctcccacgggtcttccttgaggaagcgtacgcaggcgtcgaaggtcgcgccgccccagacttccagggaccagtagccgactttgtcgagcttgtcgcagatcggcagcatgtcgtcggtgcgcatgcgggtcgccagcaacgattggtgggcgtcgcgcaggatggtgtcggtgacaaagattttcttggacattgttgtattcctcacaggcctgcgtgggcggcgatggcggcggcgatggccagggccagctcttcgggtttgcgcttgatcgagtagttggtcagctcagggtggctttccacgaagctggtgttgaactggccgctgcggaattccgggttgcgcaggatttcctggtagtaggcggcagtggtcttcacgccttgcaggcgcatgtcatccagggcgcgcaggccgcggtccatggcttcttcccaggtcaacgcccacaccaccagtttcaggcacatagagtcgtagaacggcgggatggtgtagccggtgtagatcgccgtgtccgtacgcacgccgggaccgccgggtgcgtagtaacgggtgatcttgccgaagctgggcaggaagttgtttttcgggtcttcggcgttgatacggaactgcaacgcgaaaccacggtgctggatgtcttcctgcttcaccgacagtggcaggccggaggcgatgcggatctgttcgcggacgatgtcgatcccggtgatttcttcggtgatggtgtgttccacctgcacccgggtattcatctccatgaagtacacctcgccctcggcgagcaggaactccacggtaccggcgttctcgtagcccacggccttggcggcgcgcaccgacaggtcgccgatataggcacgctgttccggagtcagttgcgggcttggagcgatttcgatgagcttctggttgcgacgctggatcgagcaatcgcgctcgaacaggtgcaccacgttgccgaagctgtcaccgaggatctgcgcctcaatgtgcttgggattgacgatgcatttttccaggaacacttccgccgagccgaaggccttggtggcctcggaaatcacgcgggggaaggcttgttcgagttcttcgcggctgttgcaacgacggataccacgaccaccaccaccggacgtggccttgagcatcaccgggtaaccaatgcggtcgccctcggtgagtgcctcgtggatatccgcgacgttgccttcggtgcccggcgtgaccggcacaccggccttgatcatgctgcggcgcgcttcggtcttgtcgcccatgcggcgaatcacttcggccgatgggccaatgaatttgatgccgcgttcggcgcagatgtccgccagttcagcgttttccgacaggaagccatagccggggtgcagcgcatcgcagccggtttccaccgctaggttcaccagcttgcgcgggttcaggtaaccggccaggggctcggcaccgatgctgtgggcttcgtcggcacgcttgacgtgcaacgcgtggcggtcggcgtcggagtagaccgcgaccgagcgaatgcccatctcggcgcaggcacgcacgattcgtacggcaatttcaccacggttggcgatcaggatcttttttatcacttggaaattcccttgagccgattgctgcgttcttcgacccactggagccgggtcggcgcgtgaccaaatgtttcatgacagtcgcgagacacacactaagcccgccaagggattaacaaaaatcaataattattgggtcgggcataagtaaagacttatagttgtccgaacagccggtggcgagagaattagaaaatgcgtaagtcattgatgcgactgacattgcgtcaattgcagatcttccatgaggtgtgcgatttgcgctcctacagccgtgcggccgaggaaatgtccctcacgcaaccagccgtcagcctgcaaatccgtcaactggaagagctgatcggccagccgctgttcgattacgtgggcaaaaagctctacatgaccgaggctgccgaagccctgcagcgcgccagtcgcgacatcttcgggcgcctggaaaacctcgatatgcagctttcggacatgcagggttcgttgcagggccagctgaaactggcgattgaatccagcgccaagtacttcgtgccgcacctgttcgccgccttcaagcgtcagcatccggaagtgcagttgcaattgacggtggtgaaccgcgcccaggtgattcgccggctttcggacaaccgcgacgacctggtgatcatgtccatggtgccccaggacatgggcctggaattcctgcccttcctcaacaacccgattgtcgctgtggcgcctcccgaccatcccttgagcctgcaaggcccgctgcgcctgcaggacctggagccctacacgctgttgctgcgcgaaccaggttccggcacgcgactggcctgcgaggagtacttcaaggaaaaacgcgtgcacttcacccagacggtggaagtggcctcggccgaggcgcagcgtgagtgtgtctgtgcgggattgggcgtagccctgctgacgcgtcatgcggtcaacatggagttggccaccggcgggctcaaggagctgccggtggaagagctgccgctgtaccgcagttggtgcctggtgcaggccaaggccaagcgcctgtcaccggtggcccatgcgttcctgggctttatccgcagcgaacgagcgcagatcagcgtgctggctgagcgtttcgctgggcagccgcgggtgcctgccagtggagttccgggtagtcactgatgctctggagcaactggcgctcctcacaacggtcttcgattgcgcgacggaacgccatgcggcgttggtcttcctgctgacgacgggttttgacggagctgttgctgtcttcgtaagtccgggccatttggagtctcccaatgcgagtacggggagttcaggatggccttggggagttacggtttggcggcacacgcatgacaagacgatgaacattcctgatctgtaggaaatccaaatgtgggagggggcttgcccccgatagcagtgggtcagccaatgcatttggtgactgatacaccgtaatcgggggcaagccccctcccacattttgacctcaggtcaatcgtcgagggctttgacggatttcggtgacaggcgaaggctgcgcagactgcgcttcacgctcttgaggtggttgaccaggctcggcccacgcgccatggccacgcccatcgccagcacgtcgatcaccaccaggtgggcgatgcgcgaagtcagcggcgtgtagatttcggtgtcttcgtgcacgtcgatcgccaggttgaccgtagacagttccgccaacggcgtctggcttgggcacagggtgatcagcgatgcaccactttcacgcaccaggttggcggtgatcagcaggtctttggagcggcccgactgggaaatgcagatggccacgtccgtaggcttcaaggtcaccgccgacatggcttgcatgtgcgggtcgctgtaggccgcggcggtgagcagcaaacggaagaatttgtgctgggcatcagctgccaccgcgcccgaagcaccaaagccatagaactccacgcgctgagcctgggacatggccgtcacggccttttgcaactccaccgggtcgagcttctcgcgcacttccatgagggtgtgcaaggtggtgtcgaagattttcaggctgtagtcggcgacagagtcgtcttcatggatcgcaaattggccgaagctggcgccagcggccaggctttgcgccagcttgagtttcaagtcctggaacccggagcaaccaatagcgcggcagaagcgcacgatggtcggttcgctgatgcccacgctatgggccaggtcggccatggaactgtgcatcacagccgcagggtcaagcagcacgtgatcggcaaccttgagctccgatttgcgtaacaggtggcgcgactgggcgatatgttgcaacaggttcaaagggcaggactcttgttatgggcagggccagggatgtagcaagcttgtagttatactacaagaattgccgttttgcccgtccgacgcatcactaaatcgccctgcccccctttgaatctaagggcagccgcgttgtagccacaggggcgtccccagcgtcgttaaggaaattctgcatttttccgtaacaaatctgccaacccatcagcctgcatcggccgactgatcaaatagccctgcacttcgtcacaacgctcgccccgcaggaaatccagctgctgctgatcttccacaccctccgccaccaccttcagcgccagcccgtgggccatggcgatgattgcccgagtgatggccgcgtcttcgcgcccctgacccaggccgcggatgaaggtctggtcgatcttcacgtagtccacgggaatgcgcttgaggtagctgagggacgaataaccggtgccgaaatcgtcaatcgccagcttcacccccaggtctcgcagttgctggaaggtcgcgatgatgtgttcgacgctgtcgagcaattggctttcggtcagctccagctccaggtattgcgggtccaggccggtttcttcgagcacctggcgtaccaggctgaccaacttgccctggcgcagttggtgtaccgagaggttcaccgatacccggatcggcgccaacccctggcgctgccactcgcaggcttgccagcaggcctcgcgcagcacgaattcacccagcggcacgatcaggccggtctcttcggccaggccgatgaaatcccccggcggcaccatgccccactgcgggtgctcccaacggatcagcgcctcggccgcattcagcttgccgctggccaggcacagcttcggttggtagaacaccgtgagctgacgctcttcgatggccttgcgcaggtggttttccagctgcaagcgctccagggtgctggcttgcaggctgtcggtgtaaaactggaagttattgccgcccaagtgtttggcgtgctgcatggccatgttcgattggctgaccaacgcggaaatttcccgcgcgttgtccggcaacaggctgacgcccatggaggcactcaccaccaactcgtgcccctccaccgtcaccggcacccgcagtttggccagcagccgcgtagcgacccgcgccaggctcgacaggttgccgtaggcgtcgaacaacacagcaaactcatcccccgacagccgtgcaatggtgtcggcctcgggcaaggcgttgattaagcgtcgcgccattttctgcaacaactggtcggcgacttcatggcccaggctgtcgttgagcagtttgaagcggtccaggttgatgtgcagcaacgccaggctgcgcccaccctggcgtacgcgctggtgagcttcgcgcaaccgttcgcggaacagcgagcggttggccaggccggtcagttcgtcgtagtgagtgaggtagcgcatacgctcttcggactcacgccgtgctgaaagatcggcgaagaagcccacgatatggctgacttttcctcgaatatcacgcacgacattcaattgcagccactgcggatacagctcgccgtttttgcgtgtctccaccaattcgccctgccacgtgccgtggctgagcaacgcctggcggatcaccgggaaatggcggcgggcgtcacggctgctgggcagttccaccacgttgcggccaatcatgtcgtcggtttcaaaccccgtgacacggctgaaggcttggttgacggcaatcagcttgtagtccggatcaaggatcacaatgccttcgctggcggcttcaaatacggtcgaggccaaccgctgctgttcctccagggccttgccggcgctgatatcgcggcgcgtccccagcatgcgcgtgacccggccgctgggcgcacgctccacggcgcggccacggtcttcgatccacacccagtgcccgtcgccatggcgcacgcggtattccacctggtagtcctcgctgcggcccttgaggtgttccaccagggcacgcttgagcagcggcaggtcttcggggtgcaggcgcggcttgaggtggctgagcattgccgttacgtactccggctccaggccgaacagctccttgagctgggtgtgatggacctcgtcggtttgcaggttccagtcccacaggcccagttcactggcttgcagggccatggccaggcgcgcttcgcttttattcagggccaggctggcggcgtccagttcctggctgcgctgtgccacacggtcttgcaggccggtctgggcttcgcgcagttcctgttcgacttggcgacgctgctcgacttcgcgcaccagttcctgattgagttgctcgctgcgctgctgcgcctgttgcaggtgctcgatcagcgcctggttctggaagcggcgcaacaacccgcgctgaatcaggcgattgacctgccacgccaccaggctcaaggacgccagcaggatcaggccaagtacaccccagccgcgctgctgcgggtcgccactccagaacaggtagaggatggacggcaccaggcacggcaaggcaaaggacaggaacgccggcaggctcacggcgtatgccacgctggccgacaaggtcgccgcgccgatcaggccgaacacccaggcctgttgcatgaagctgtccaccggcaccagggcgatggcggcggtggccagcgtcaggccgctgaccgccgagccgagcaggaacatgcgttgccacaccggttgggcctggcggctgggcatcgccgagtcaaacgcggccacctgaatcacacgcatcgccaccagggccagcagccagaccaaccagacgctgtccaacaggtattgctgggggttccacagtagccaggcgcagaccaggccattgaccaacatcaacagggtcggcagcagcgagccttgatacagcaggcgtgtgcgctcgaccgccatctccgtggcgtagtgtttacggataacctgcgcgggagccgccgaggggccaagcaggtcggtgctaagggtcataggcagtgttcttataatggtgagcccgaaacgtcgacggagcatacacaagcaagcgcttgggccaaactgctccatgtcataaaaccgcacgctcatgccgcgcaaacttccgggccagacggcttgagtgagacgcggcgcgggctgtggccattgaccgaccggtcatcaccccgcaggtttgcctcgaccacccggcattgttatttgccccactcccccgggggccatagaatacgccgatgcgcgatgatctctcccttttgctgaactccctcaacgatgcccaacgccaggccgtagcggcccccgttggccgtcagttggtcctggccggtgctggctccggtaaaacccgagtgctggtgcaccgtatcgcctggttgatccaggtcgaaaacgcgtccccgcattccatcctgtcggtgaccttcaccaacaaggccgctgccgagatgcgccaccgcatcgaacagctgatgggcatcagcccggccggcatgtgggtaggcactttccacggcctggcgcaccgcttgctgcgggcgcattggcaggaagcgggcctggcccagaccttccagatcctcgacagcgatgaccagcaacgcctggtcaagcgggtgatccgcgagctgggcctcgacgaacaacgctggcccgcacgccaggcgcaatggtttatcaacggccagaaagacgaaggcctgcgcccgcaacatatccaggccagcggcgatctgttcctggccaccatgcgcagcatctatgaggcctacgaggccgcctgcgtgcgcgccggggtcatcgacttctccgaactgctgctgcgcgccctcgacctgtggcgcgataacccaggcttgctggcgcattaccagaaacgtttccgccacatcctggtggacgagttccaggacaccaacgccgtgcagtacgcctggctgcgcctgctggccaaaggtggcgacagcctgatggtggtgggcgacgacgaccagtcgatctacggctggcgtggcgcgaaaatcgagaacatctaccagtattccgaagacttcccggacgcggtcaccatccgcctggagcagaactatcgctccactgccgggatcctcaaggcggccaacgccttgattgccaacaacaccgggcgcctgggcaaagaactgtggaccgacggcggcgaaggcgaagcgatcaacctgtacgccgcgttcaacgaacacgatgaagcgcgctacgtggtggaaaccatcgaaagtgcgctgaaaaccggcctggcgcgcagcgacatcgcgatcctgtaccgctccaacgcccaatcgcgggtcctggaagaagccttgctgcgcgaacgtatcccgtaccgcatctatggcggccagcgcttcttcgagcgggccgagatcaagaacgccatggcttacctgcgcttgctggaaggccgtggcaacgatgcggcgctggaacgggtgatcaatatcccggcccgtggcatcggcgaaaaaaccgtcgaagccattcgtgaccacgcacgccacgccgatgtgtcgatgtgggaagccatgcgcctgctcatcgccaataaaggcctgaccggtcgtgcggcgggtgcgctgggtgtgtttgtcgagctgatcgagaacctggcggccaagtgcgcggaaatgcccctgcatttgatgacccagaccgtcatcgagcagtccgggctgatcgcctaccacgaagcggaaaaaggcgagaaaggccaggcccgggtagaaaaccttgaggaactggtcagcgccgcccgtgcgttcgaaaacaccgaggaagacgaagagctgaccccgctggccgcattcctcggccacgcgtcgctggaagccggtgatacccaggccgacgagcatgaagacagcgtccagctgatgaccttgcacagcgccaagggcctcgaattcccgtatgtgttcctggtgggcatggaagaaggcctgttcccgcacaagatgagcctggaagagcccggccgccttgaggaagaacgtcgcctggcctacgtgggcatcacccgggcgatgcagaacctggtgatgacctacgccgagacccgacgcctgtacggcagcgagacctacaacaaggtgtcgcgcttcgtacgtgaagtaccgaaggggctgatccaggaagtgcgcctgtccaacagcgtcagccgcccgttcggtggtggacagcagcagaactccagcagcatgttcgccggctccgagattccggaaacccagttcagccttggccaacaggtcaggcattcggtattcggcgaaggggtgatcctcaatttcgaaggcgcgggtgcccaggcgcgcgtgcaggtgaatttcgccgaaggcagcaagtggctgatgatgggttacgcgaagctcgaagccatttgaaacatttgcccacatgaaggtttttggcccgcccttgtttttaacgagcgcgggccaatatctgtaataagtcctacagaccactctgaatcggtcctacgcaaaagcccgaaacattatgccgctagccactgtcaccacacctgtgcaacatggcgcgcgtgcaatccacaaatgggaattccctttatgaaacgttttcttagcatcgccatggcgttgtgcatcggcctgacgatgagcctcgacgccaacgccaaacgcttcggtggcggcaaaagctcaggcgcagcaccgactcaccagactagccaaatggctccatccgccggtgccggcggtgctgcggccaccgcaggcgccgccggtgctgcaggcgctgcagccaaggccggcggtgcttcgcgctggttgggccctcttgccggcatcgccgccggtggcctgctcgcctccatgttcatgggcggcggcttccagggcatgcagatcttcgacatcctgatcatggcggtcatcgccttcctggtcttccgctttatcgccgcccgtcgccgcaagcagcaggagcacatggctccagccggcgcgccgatgcagcgtgaagtgttcgagcaaaaaccagccatgggctcgatcttcggtggttcgccagcgccagctgcggcccgtccggtgatcaacgcaccggcctggttcaacgaagaacgtttcgtcgaagcggcccgcagccacttccagtccctgcaacagcactgggacgccaacgaaatggacaagatcgccgagttcgtgaccccgcaactgctggagttcctcaagcgcgaacgcgccgagattggcgatgcattccagtcgacttacatcgacgacctgcgcgtgcaactggacggtgtggatgatcgcgccgacaagaccatcgccaccctgaccttcagcggtgtgtcgaagtcctcgcgtttcgaccagggcgaagtgttcagcgaaagctggaacatggaacgtgcccagggcgataaccagccatggctggtcgccggtatccgccagaacggctgatccctgcacgcttggtaaacagatacaaaaaaccccggacctgtccggggttttctatttcacggttgcacttatagcgagctactgtataaaacgcccctataaaccgcgccatctagcaagaggatcccggccgtggaagaaatcatcgaacaattgcgtgaagccaacgaaccggtcccggttcccttggagctgcctgacgaagaccaactggtggagatcgaggaacaactgttcatcgacatcccgtttgtcttccgtgaattcctgctgaccgtcagcgacgtggtgtacggcagcctcgagccggtgaccgtcaccgacccgcagtcccacacctacctgccggacgtggccgccaacgcctgggacgccggtgtcgaccgcagcctgatcccgatctgccaggacggcgacgactactactgcgtcgaagaagacggcaccgtggtgctgtggtccggcgaagaagaaatcgtcaccgaagaaacctgggaatcggtgtggcactgggcgcgagacgtctggctggaaagctgacagcgctctctggctaaagaggcttgctgtggcgagcgggcttgccccgcgtcgggctgcgaagcagcccccccaaaaaagtccctcaatgctccggcgtatccttatggttatccagcgtctccaacaaggcgacctgcatccgcgtatgcacgcggatgaaccatcgccagagcaccgccgccacagccgccgtgaccacggcgatcagcaccagcaacttgttggtcggcagaatactggccgacaaggctgccaatagcaggaagatcaccagcagcgagaggatcgggatcagctccgcgatcacccttcgcacacgctgggtatgccgcccggccatttccggcttcacgctcatctccgccagcagcatcgacagcgccttgagcttgcggtatgccgcaatcaagaacggcagcgacaacagcaacgccccgccccagatcaacgccttctgccagctcggatcgctgatccagccttccagatacccaccgatgcgcgccgcgaaaaagccgccggcaaagaagatcgcaatcaccagtgccaggttaacgcccacttgcaggatgatcttgcggatcatcgacgccagcatcgccccctcgccctggggttgaatgctgcgcagccattcgccatacatgccgaatactcggctcatacgctggggcatgaccgacgcgatcttcaacgacagcgggtcggcaccgcgaatcaggtacggcgtgagcagtgtggtgatggccgaaaccgctaccgccaccgggtagaggaaatcactggtcacctgcagcgtcatccccagcgccgcgatgatgaacgaaaactcgccaatctgtgacagccccatgcccacgcgcagtgaggtgcggccgtcattgccggcgataaacgcccccaggccgcaggacagcatcttgcccagcaccacggccacggtgatcaccgcaatcggccaggcgtattgcagtaggatctgcgggtcgatcatcaagccgatggcgacaaagaagatagcactgaacatgtcgcgaactggctcgatcaggcgctcgatcttaatcaactgccgagattcggccatgattgcgccgatcaggaacgcgcccagcaccatgctgtattccagtttgaccaccagcaggcagaaaccgaaacacaaccccagtacggtgatcagcaacatctcgttgctttcgaatttggccacgtaggccagcaaacgcggtaccagcaaaatgccgatgaccagcgcgacaatcatgaacagcgagagcttgccgactgtggagaacacttcgccggagctgaccgtaccgctgacggcaatgctcgacagcaaggcgatgatgccaatgccgaggatgtcctcgacgatcagcacgccaaaaatcagttgagcgaaacgctggttcttcatcttcaggtcattgagcgccttgacgatgatggtggtcgaggaaatcgccaggatcgcgccgaggaacagtgaatccatggtattccagtcgaaccagcggccgatttcgtagccgatccagatcatcaggatgatttccaggaaggccgcgataaacgcggtggcgccgaccttgaacagtttgcgcaggctgaattccaggcccaggcagaacatcaggaagatcacccccagctccgcgagggtcttgatagtgtcttcgtcgtggatcagaccgaacggcggggtgtgggggccgatgatgaacccggcgacgatgtagcccagcaccaccggctgcttgaggcggtgaaacaggatggtgacaacccctgccaccagcatgatcacggccaagtcctggataaagctgatggcgtgcatggcgaggggctccttgagggtactggcgcttttcccacttccgcgcgcgcctttgaaatgtcgcaaagtgcggaaggaaaagtctgccttgatcgtaagaaatgccctgagatgggcttttgaaggttaacaccgcgacttccgccggaaagccggtgcaatatatggaaacagatcggtgcgcgcgtgacggcaagccccccaccggcgtcccgttatggatggttctgcaaagattccagcacccgcagaggtgccccccaaccaatgcctacaacccgtgagtgtgctatggaacccggaaacgcccagctgtcgatgacggtattgatgacccctgacatggccaacttctcaggcaatgtccacggcggcaccctgctcaagtacctcgacgaagtggcctacgcctgcgcgagccgttatgccggccgctatgtggtcacgctgtcggtggaccaggtgatcttccgcgagccgatccatgtcggcgagctagtgaccttcctcgcgtccgtcaactacaccggcaacacctcgatggaggtgggcatcaaggtggtgaccgagaatatccgcgaacgctcggtgcgccataccaacagctgcttcttcaccatggtggccgtggacgaccagcgtaaaccggccgccgtgcccccgctgcaaccacagaacagcgaagacaagcgccggttcgtgcaggcccagcagcgccggcagatccgtcaggaactggaaaagcgctaccaggaaatcaaggcagacgcgctgtaggccctttccccgttgtaggagcgaacaaccgcgctcctacaatcgccagcactgatcatcgtgggcacagacatcaaagcgctggtccaactggctcatgcgctccatatgatggttcacgatgtccaccatcaccgctttgctggtgtttttgtagtactgcgccatcaacttgtcgttcgccttgacgcgctcgaccacggcggcgtccgtcgggttctgccattgctccaggatggcatcttcggtgccgctcaggcgcatgcggtaaacccgctcataaagcgccagggtacgcgccttgcggccggccatttcctgattcaccagtgcatagttctgacggtactgaacccaatagtcgtcaggtggcgtgaatgagccgaatcgcgccttgcgctcggcgattgactcttcgacggcttgcggacgctgcgcggtgtcaggctccatcaacgtgatgagttgcatatgggtttcaacgatcgcgttgatcaacgcggtacggtgtggcgtatccgggatcaccttgccgaatatcgggcttttgcccgcgcacgatggcatgccgttctcgaatatcggctgtggaatgcgtacatccttgccacccgagcgcgtcaggcgctgcaacgaggtcgtgcagatgccacgcgccatatcgaaggtcacttcgtactcttccccggcctttggcgtgatgctcattgatttgccgcagacatagctgccgccattggtgttgatcatcaacatggtttctttgccgggtgccagcttgaactccagcaagcctctggccgtggccggcgggggcaccgacatgccgacacgccgccgggtatcgaccaggaaaatattgttgagcatgccggtggtctggcccatgcaatgctgcgtatcgtagacgtcgatggtggtattggaggtattggagatgaagcgcagcttggcagcgtccggatcggtggcgtcagggtaagtaccgttcacactgcaaccggccagcaacgatgtcagcaccagggcggtcagtgcccgtggcgaagggaatacgggggacatggttcttccttgaaaagcacaggggactaagaggcgcccgatagtaccggacgccctttgcctggctcaatcaggaatattcctacaacccgataggcgtggcttcgaaacgcacgcgaggatgggcaatgcggtcctgggcgcgcaccagctccagttcgtaactggcgcaggcctgggtttccaacagcacttcatggaccgctgcggcggtgaattcgaaggcggcgagcaggctgtcgcccaacagaacacgcgccagaaacagccccgaggtcaaatcgccgacgcccaccggctgacgggggaacgccagcagcggccggcgcaaatgccagctaccatcggcggtcaccagtagcatctcgaaaccgtccggcaacttgcctggataatccaggtgtttgaccaatacggccttcggcccacgcgccagcaacgccttggccatggccaggcaatcgaacagcgattgcggcttgcgcccggcaaagctgtccaactccaactggttggggcacaggaagtcggccatggccgcggcttcgtccagcaggaaatcgctgacttcctggggcacgatgcagcccttttcaggatgccccatcaccgggtcgcacaggtacagggccttggggttgatggccttgatgcgcgcaacgccggtcagaatcgcccggccctgatcggcactgcccaggtagccggacagaatcgcatcgcaattgcccagctcgccgatggcggcaatgccttccaccaacgcgggaatctgctgtggcgccaacacttctcccgcccattggccatactgggtgtggttggagaactgcaccgtgttcagcggccacacgttcacccccacgcgctgcatggggaacacggcggcgctgtttccggcgtggccaaagaccacatgagactggatcgcaagcagatgaggtgtgcgtttcatgcgggagatttccgtaaaaccaatgaaattctggccgcgcagtatgcgactaaacgcagcctgtacgacagaccggcgacacagttaagctgctctcactttgttggagtttttcgcatgctgaccctgggaaacatgttcgtgttgatgctgctggcgaccggtgccgcctgggtatggcacaaccacggcctgcgcgagcgggcgctggagcgggtcaagcagcattgcgccaagctcgacatcgaactgctcgacggtgcggtggcactcaagcgcatcggctttgtaaaggatgccaacggtcggcgacgcctggcgcgcatctacaacttcgagttcaccgtgaccggcgaaacccgccacccggggactatcacccagttcggtgcccacagcgcacagatcgaactggcgccctacccgttcgagatcaagacgccgctgcccagcgccgaagtgattgagctgagccagtggcgccaggaccatgcgtccaagaaccgtcactgacgactggcggccagcgcacgctgtaacacatccacgtcctgtggctcgctgaagatcaattcgatacgcgaatcgcggcgccattcgctgggttgccagctgagcgggccgttatccacagcgttggcggacacccagccttcggcactgtggataaccagcttggcgcggcgccaatcaaggcttgtaagccagttatgcagctgctgggtgtcgaactgctggctggggtgccagcgccagccaatgctccaaccgccctcttgagcctgactcaggcaaatgggttggtcaggatcggtccagatagccggcatttgccccaggcctgtgggcacggcgaagttatccacagccgcaacagcccgtgcgtcaaggccgggtaaatgcgctagcggtagatgcgcctggcgagtccagtaaagcgggcattctggtaactgccgctcgatcacctcgcgctgcgctgcattcagtgcttcgtctttgttcaataccagcaacccggcactcgccaacgcttcctgctgcgctgggggcaagggtttgcccgccgccagcgcttgcgcatccagcaccagcacgcacggctggacggccagcacgttgtgccacggcgcttcgcgcaactgcttgagcaactgcgccggatgacccaggcccgagggttcgataaacaaccgatcaggcttggccttacccaacaagcgacccaagcctacttggaacggagcgccattcacacaacacaggcaacctcccgcaacttcgcccaaggcaatgccgtcgtcatcttgcgtgagcaaggcagcgtccaggccgatctgcccgaactcgttgatcaacacagcccaacgctcattggctgggcgttgggcgagcaggtgctggatgaggctggtcttgccggcgcccaagggcccggcaatcacgtgggtgggaatgttctgcagcatgagaggcatcgttcggaccgtgtagagcgtttgatcctacgcggttatgcgagccaatccagtgtcaggatcaagcggcgctcgtcggccttcagtgcgggcgaacggtgaatcaggccatggccttcattgccatgccatttggtgcccttgagcaaggccacttcgccgcagtggatctgctcgatacgctcggtgggttcggcatccggctggctgagtttgcgacggtccatcacgccttcacgcaaccactggctgccaaccccggcataggtggtgatcaggcgcaccggcacgtggtcgacgtgaaaacgcgggcacatggctttatccaacagacgcaggcgcacgccgatccgcttggcgccgagcaggcaggcgaacgcactgaccagccacgacacatcggcgataaagccttcgtagccctcaagatcacgacaactggacgccaaaccctgcaagttgggctcggcatcttcattgttgagctcgatgaccatggagtcggccaacggctcgttgagcgacaccaacaacgcgccgaactcggcgatgtgcagcggcaactgacgctgccacagcgccaggttgacgccgtcttcgaggatgtcggacagcgccagcggggtgtcaccacgggtctggcgaatcacgggacgcagggggataaccggggccagcatcaggcggctgcctcctcataccaggggccaaaagggtcggccagcaggcgccagccttcgacgcccagggccatttcttcatcggtgagcaagcacgcatccaactcggcgcgcattcgggtgaagtcgatgttctggccgataaacaccagctcctggcggcagtcgccagtgctcagttgccagttgcccatgatcgccgcgatgctctcttcgtcctgaggccattggcttttgggcacaaagcgccaccagcggccggcaaacccatgacgcatcagaccgccggcctgggaccaactgcccgcatcctggtgtttgctggccagccagaaaaaccccttggagcgcagcagtttgccgttgacccaggggcggtcgataaagtcgaaaaagcgctgcggatgaaacgggcggcgcgcgcggtaagcggtggaggcgatgccgtattcctcggtttccggcacatgttcaccgcgcaattcctgcagccagcccggcgcctgggcggcgcgctcgaagtcgaaacggccggtgttgaggatcttgttcagcggcacttcgcccatgaccatcgggatgatttccgcctgggcgttgaggcgctcgaggattgccatcaactcttcacgttcgcggctgctgatcaggtcgatcttgctgataaggatcacgtcggcgaattcgatctgctcgatcagcaggtcggtgatggagcgctcgtcttcttcaccgagggtttcaccgcgcgaggccaggctttcggcggcctggtagtcgagcaggaagttcatgccgtcgaccacggtgaccatggtgtccagacgggcgatgtcggccaggctttgctcgttctcgtcacgaaaggtgaaggtctcggccaccggcaagggctcggagatgccggtggattcgatcagcaggtaatcgaagcgaccttccttggcgagttttccgacttcttccagcaagtcttcacgcaaggtgcagcagatgcagccgttgctcatctccaccagtttttcttcggcacggttgagggtgacgtcgcgctggacttcgctgccatcgatgttgatttcgctcatatcgttgacgatcaccgccacccgcagattttcgcggttgcgcaggacatagttaagcagcgtgcttttaccggcgccgagaaagccggacaacacagtaacggggaggcgattgggcatcaggtattcctcatcagggttggccggtcaaatcgcccgtttatggcgttcgcgcagctcttcacgttctttggcttcgatacacagggtggcggtaggacgcagcaacaagcgcttcaggccgatgggctcgccagtctcgcggcaccagccgtactcgccgcgcgccagcaattcgagggcgtcgtcgatcttgtccagcagcttcttttcccgctccagcaggcgcagttgccattgacgctgttcttcagcgctaccgacatcggccgggtcgctgttggtttcctgctcgcgcagcagcaggaattgggcgtcgatacgcgcttgcagctctttgcgttgggccagcagcaactcacggaagaagccttgttgggcctcattcatgtagtcgtcgggcagctgggccagcaggtcttgttcggtcatggagagcggttcacgggtcaggctgtgcttttatgttatagtataacaatacaaataagccaataccctcttgctcaccacgacgaagggcgcaatgcttgaacacttccctgccgcgagaaacctgatgaaatacctggtgtgcgccctgtttttggctgcggcgggacctgcctgcgcccaggcccccagcctgttggcccactgcacgcgcagcgccaacctgctggcttgtgtggatccattgggcaatgcctacagcgtggcgaccgtcggcagtaccacgtatttgcgcgggtatgaggtgatcggcaagcgctactgggcgcagaccaacagccgctacgggcagctgacgttctttaccgggttggcgtcggatggtgaggcgtgggtcggctacacgcggcgcgtgggctggaccaccctcaaccggttttccagttcgggtggcgccagcgccaaattcacctgcagccgtataacgggttgctagacctgggcgttcttctgttcctgcacccacgccatgtagctgttcatcggtgggttcttctggaaatactttttcaagccttcgaacaacccatcggcaactgcctgttgatgccgcgcggtgaccagccgcgcgctgtcccgcgcattggaaataaacccggtttccaccaaaatcgatggcacgtcgggtgacttgagcaccgcgaatcccgcctgttccacgcgtttctgatgcaggctggtgatgccttccaggctgcccaggatcgaattgcccagttgcaggctggaggcgatggtggcgttcatcgacatgtccaggatcaccccggcgagcatcgggtccttgtccttcagattcagcaggctggtggcgccaagcaaatcggcaccgttttcccgctgcgccatgaacctcgccgtggcggacgtcgcgccgccttcggacaaggcatacaccgacgcgcccgaggcagtaatgcgcggtgccgcgtccgcatgcacggagataaacatgtcggcattgtgcttgtgagcgatctccacccgtttgcgcagcggtacgaagaagtcatcgttgcgcaccaacttcacatcaaagcccttctcgcgcttcaagcgtttggccaacagttgcgcgatggacagcaccacgtctttttcgcgctggcccttggacccgaccgcgcccgggtccttgccgccgtggccggggtccaccaccacaatgatgtcgcgcttggggtgcgccttatccacgcgcggcgcaggttcggcggcaatctggcgaggcgcctgggtggcgttggtcaggtccagcaccaggcgatgaccctggccgtcctggggcggcaatagaaagctgttgagctgcatcggtgcgaccaggtccagcacgatgcgcgtatcgcctttaccaaaatgcccagagcgaatcgaggtgatgccgctgttcttcaacgccaactgagagaaatcaccgctgaggccggcgccgctgaggtcgatgatcaggcgttccggcgcgctcagggtgaaggtcttgtattgcaccgggccgctgagatcgaacaccaaccgcagcttgtcgtccgaacgccacaggcgggcgttgctgatctgcgtggcgtgggccgcgaatggcaaggtgaaaagagggctggccagaagcaggttaagaagctgacgtctgtgcatgaaaagtaccgcaaaaaaggagcgtccctgctcgacatgactgaaaaaaggctggcgcagaaaaaccatcgtcgacacaatagttatactataacatgtctttttatttccaatgatggacctgctcatgaatgcgctgactctgccggatatcgccgcgcaggcttcacgccaagccttgccactcgactgggtaggcatgtgcggcatcgccctgccaatcctcatcgacggccagcgcctcaccgccagcgccgatgcgggcgtgagcctggacgatggcgccgcccgtggcattcatatgtcacgcctgtatctggcgctggagatgctcgaccagcagccgcttacgcctgcacttctgcgtaatgtactgcagcgttttctcgacagtcatgaaggtttatctaataacgcctacctgcgcatccacactgatctgctgctcaagcgctcggcgctggtcagcccgttggccggctggaaaggctacccggtgagcatcgaagcgcgcctggaaaaacagatgttccacgtggaactaaaaattgacgttacctattcctcaacctgcccgtgctcggctgccctcgccaggcagttgattcagcagcaatttcttgaagactttggcaacaccccgctgcagcatgaggacgtgttgacctggctcggcagcgccaacggcatcgtcgccacgccccacagccagcgcagcaccgcgcagttgctgatcgaactggatggcgaccaacccagcctgcccatcaccgaactgatcgataacgtcgaagccgccctcggcactgccgtacaaaccgctgtaaaacgcgcggacgaacaagccttcgcactggccaatgggcagaacctgatgttctgcgaagacgccgcccgccgcctgaacctcgccttgaaacgctcggatgccgtcaaagccttccacctcaaagtgatccacgccgaaagcctgcacgcgcacgatgccgtggctgaaagccgctggacgagaaaccctgcatgatcacctgcaccgccttacgctggggcgccccgggccaaccactgacgcccggcgtcgacctcacccttgagaaaggcagcctcaccggcatcatcggcgccaacggcaccggcaaaagcagcctgctcaaagtcatcgccggcctgcaaaaacccttggcgggcaaggtcacggtggcggttccacgccgtggcggtctgtcgtttctgccccagcaacagcacctggaccgccagttccccatcagcctgcaggaactgatcgccgccggattctggggcacccagctctccccgcaacaacgcagccagcgccttgaagccgtgttggaggactggtgcctcagcggcctggaacaccgcccgttgatggcattgtccggtggtgagctgcaacgcgcgctgctcgcccgcatgagcctggccgaagcgccggtgctgctgctcgatgagccccacgcagccctcgatgaagaaggccaggcgctgtgctggaaacacatccacgcctggcacgacgcaggccgtacgctgatcgtggtctgccatgacctcgcttccgtgcgccaccacacccagcaggtggtgcagatcaaaaacaccggctgcctgttcggccccagcaaagagctgatccgcccacagccccaaatgcaggtggcctgatgcacttcgccgcccacctgtggatgcccttcctcgacttcgtattcatgcgccgtgcgctgatcggcggactggtactcgcctgcagcaccgcaccgctgggggtgttcctgatcctgcgacgcatgagcctgatcggtgacgccgtggcccacggcatcctgcctggtgccgccctcggtttctggtttgccggcctcagcctgccggccctaaccatcggcggcctcggcgccggcctgagcatggccggcctgtccgcatggatcacccgccgcaccggcctgcgtgaagacgccagcctggccgccatctaccccatctccctcgccgccggcgtgttgatcctcggcatcgccggcaagcgtctggatctgctgcacctgctgttcggctccgccctggccgtggatgaaaccaccctcaccggcatgctctgggtctcggggttcagcctgatcgccatggcggtgatctacagaccgctgttgctggacaccctcgacccgctgttcctgcaaaccgtcagccgcctcggcccactggcccacgggttgttcctgaccctggtggtgctgaacctggtgatcggtttccaggccatcggcgccttgatggtggtgggtttgatgatgctgccggccatcgcttcgcgtttctggagccggcgcctgccggtgttgatcgcagtatcggcggtgctgggatgcctgtcggtatggctgggtttgttgctttcgttctactactcgctgcccagcggcccggccatcgtgctggtggctggcgccgggtatctgctgtccgtggtcttcggtccggtgcacggcttgctgcgccgcccgccctcccttacatcccaatgaggtgtttcccgatgcgcgctttactcgtgctgttcagtctgctgctgccgctgtcgatggcccaggccgccgacaaactccaggtggtgaccagtttcagtattctcgatgacatcacccaccagatcggtggcgatcacatccagatcagcaacatggtcggccccgacgccgacgcccatacctacgagccaacgccggacgatgccaaggcgttgctcaaggccaagctgatcatcaagaacggcctgggcttcgagccgtggctggaccgcctggtggccagcaccgaaaccaaggccaccgtggtcaccgccagcaaaggcgtgatttcccacaccatggaagaagacggcgaaaccattcctgacccacacgcctggcataacctggccaacgccgaaatctacgtgaacaacatcaccaaggcgctggtcgccgccgacccggcgaacaaggcggattacctgcgcaacagccaggcctacctgaaagaaatctaccgcttgctggccgaagccaaggccaagttcggtgcgctgccagcaggcaaccgccgcatcgtcacctcccatgacgccttcggctacctgggccaggcctacggcattgagttcctggcgcctcagggcttgtccaccgaacgtgaaccctcggccgccgaagtcgccgcgctgatcacccagatccgcaaagacaaggtcaaggccgtgttcatggaaaacatcaaggactcgcgcctgctcaagcagatcgctgacgaaagcggcgcgcagatcggcggcacgctgtactccgatgcccttgctgcagaaggcccggccagcaccttcaccgggttgttcgagtacaacctcaacactctgtgtgcggccctgagcaagccatgaccctgagcatgctcgacctggaaggggctgccgtgggcagccgctttccactggaacctgtactcgatgcactgccgtggaacagcgacggcctgatcgccgccattgcccagcaacacggcagtggcgtggtgttgatgctggcctggatgaaccgccaggccctcaaggaaaccctggccaccgggcaagtctgctactggtcgcgctcgcgccaacagctatggcgcaagggcgaaagctccggccattggcaacagctggtcgaagcacgcctggattgcgacggcgacgctgtgttgctgatcgtcgaccagcaaggcccggcgtgtcacaccggccgccccacctgcttctacaacgctatcgatggcgaccacgttcacatcatcacggagccctcagcatgatccgcaaaaacccgtccggcgatcttcccgtcattgccgaatcggcctacgtcgacaagaccgcaatcatctgcggcaaggtcatcatcggcgagaacgtcttcgtcggcccctacgcggtgatccgcgccgatgaagtcgacgccagcggggacatggacccgatcaccatcggcgccaactccaacatccaggacggcgtggtcatccactccaagtccggcgcggccgtgaccatcggcgagttcacctccattgctcaccgctccatcgtccacggaccctgcagcgtcggcgaccgtgtgttcatcggcttcaacagcgtactgttcaactgtgccgtgggcgatggctgcgtagtgcgccacaactcggtggtcgacggccgcgatttgcccgccgccttctacgtgccctccaccacccgcatagggcccaacaccgacctgtcgcaattcccgccggtgagcgtgagcgcctcggagttttccgaagacgtggcgcgtaccaacgtcgacctggtgcgcggctacaaagccctgcaaaacgagttctgagccatgagccgcgtgctgattcgcaatgcccgcctggtgaatgaaggccaggaattcgacgccgacgtactggtcgccaatggccgcatcgagaagatcgccagtagccttgacggctataacgagccggtggaaatcgacgcccaaggccagtggctgctgccgggcatgatcgatgaccaagtgcactttcgcgaacccggcgcgccggacaaaggcagcttctacagcgaatcccgcgccgcggtggccggtggcatcaccagcttcatggacatgcccaacaccagccctgccactttggacctggaaaccctggccgataaaaaacgccgcgccgccctgcattcggtggccaactatggctttcacttcggcgtgagcaacgacaacctcgacaccgtcgccgccctcgacccgcatgaagtcgccggggtcaaagtgttcatgggtgcgtccaccggcaatatgctggtggatgacccgcggatcctggagcgactgttcgccgaagtgccgaccatcctgctggcccattgcgaacacacgccgagcatccaggccaacgaacaacgtttgcgcgagcgcttcggcgacaagatccccgccgtcgcgcacccactgatccgcgatgccgaggcgtgctatcgctcctcgtcctttgccgtggaattggccaagcgccatggcacgcgcctgcacgtgctgcacctgaccagcgcccgcgaactggcgctgttcgaagacaaacccctggccgaaaaacgcatcaccgccgaagtctgcctgcaccacctgctgttcgatgaccgcgactatcaccgcctcggccaccagatcaaatgcaacccggcgatcaagagccgcgccgaccgcgacgccttgcgcctggccttgttgagcaaccgcctggatgtgatcggcagcgaccacgccccgcatggctgggcgcaaaaacagctggattaccgtgaagcgccggcgggcttgccgctggttcagcatgccctgcccgcgctactggagttggtagccgatgggcacctgccgctggcgaccctggtcgcgaaaaccagtcaccgcgtcgccgatctgtttgccatccccgatcgcggttatctgcgcgaaggctattgggccgacctggtgctgatcaaactcgagcccggaggcaaaccggtcagcagccaaccaatcctggcccgctgcggctggacgcctttcgccgagcgcagctttcgccatagcgtcagcaccaccttggtgtccgggcacctggcctttcataacggtcaggtaatagacagctgccaaggattacctttgcatttccagcgctagagaagacggcgatgatccgcatcaccctgccagacggcacccaacgcgagtacgacggcgctttgtcagtttatgaagtggctgccagtatcggggcggggctggccaaggcagcggttgccggccgcgtcgagggtgagctggtggattgcgagcacgtgctggaacaggacacccggctccagatcatcaccacccaggatcgcgaggggttggaaattctgcgccgctcctgcgcgagcctgttggcgatggccgtcaaacaactgtttcccagcgctcaacgggtagccggggcggtagtcgaagacggtttttactttgacttggcctacgaacgcgtcttcacaccgaccgacctggaactgctcgaggcgcgtatgcgccagctggcaaacaccaatcattcggtacggcgcttgggagattttgacgccccaagccaaggccccctcgtgccgagcacgggtgtgatccaggccttcaaactgaccagggttgtcagcaatgcgtcacagcagcgcatcacaggcacctgctgggccagccagcaggtggcggtgctcacgatgagtcaacaccaggtcgacttcggccagcaggtatgcgatgcactgaaaggcgtgggcgtgcgggcgatcatggaccggcgcagcgagaagatcggctacaagatccgcgaacacagcctccacaaaacgccgtatttggtgatagttggcgagaaggaaaaaaccggcggttacgtcagcctgcgtagccaccggggagaagacctcggccagatgagcgtcgaggccttgtgcgaaaggcttaagcgcgaggcttgaccgtaccgcaatcgttacccagccactgggcgtggctgtccaggctgcccttctgctgaatgccggtggcattgaaggtgccgttgacggtggtcgtaaactctttctggctttggaacgtagctacacccgtgccctgggctttcgggcaactgaaacggaatttccactggttgccggtcttgtcggtcacttgctgtttgcagcccgattgcgggtcggtcagggggatagaatcagaggccacctgtgccggcgtcaggcacacctgcacgcctttgccagccatggtgatgccttgtttttccagcatggcgcgctgctcaggggtcatctgctgcttgagttgaccgaggatcagcgacaggtccggcaggtcctggttatcgactttcatattgctggtggtcaattcccacaagcccggcgccagcatctgcgcctgtgctgccacgggcagcgacaaaccaataaccatggctaaaccaaacagacgagcattcatcgggtaactcctgggcaattgttggcgttagacgccgcaaaggcgtcagtgttgcacgccaaataaaatagcgacattcgtgaccgaacatggtctgttaggcactggattgtctggagtaccgtcgtccatggatttttttggcccgcacctgctcgcctacttcatcgccacgctgcactttctcgggactctcgccgcgatccacgcggtgctgaccgtcaggaccgcccaaggctcgatcgcctgggccttgtcgctgatgttcatgccctacctcacgttgatcccttacctgatcttcggccgcagcacgttcgacgcctacatccaggcccgccgccaggccaaccaggaaatgcacaccgcgatcaccgcgctgaactggcgcccctgggtcgaggaagccctggcagcacgcaactccagcgcctacacctctttgcgcgccatgcccaagctgggccgcatgccgtgcctggccaacaatgaagtgcgcttgttgatcaatggcgaggccacgttcagcgcaatcttcgaggcgatccgcaacgccaggacagccgtgctgttccagtttttcatcattcatgacgacgagcttggccgccaactgcacgccctgttgaaggaaaaagccgctgaaggcgtagacatccacgtgctctacgaccgcatcggcagccacgccctgccccatcgttatgtacaatcgctgcgcgacgccggggtaaaagtcaaagcgttcgccacccgcagcggctggctcaatcgcttccaggtcaacttccgcaaccatcgcaagatcgtggtggtggacggcatcaccgggtttgtcggcgggcataacgtcggcgatgaatacctgggcaagaaaccaccgctggcgccgtggcgcgacacccatgtgcaggttaccggcccggtggtggcgtgtttgcaggagtcgtttgccgaagactggttctgggcggcacgcgagttgccgccgctgatcctgccggacgcctacccggaagacggcgtgctctgccaattgcttgccagcggtcccgccgccccatatgaaacctgctcattgttttttgtcgaggccatccacgcggcgaccgaacgcgtatggatcaccagcccgtacttcatccccgacgaagccgtgttcgccgccctgcgcctggcggtgctgcgcggggtcgatgtgcgcctgttgctgccctcacggcccgaccaccgcatcgtctacgcggcgtccagcctttacgcgatcgaagcggtgcgcgccggtgtgcgggtgttccgctacacgccggggtttctgcatcagaaggtggtgttggtggacagcgaaatcagcgccatcggcagtgcgaacatggacaaccgttcgttccggttgaatttcgaagtgatgttgctgacggtcgacgaagccttcgctcgggaagtcgagcagatgctgctggacgacttcgccctggcccacgaggtcagccagcaagaaagccgcgagacccgccgcctgcaacaactgggcatgcgggtcgcgcggcttatttcaccgattctctaacacactgcggtgaaccctgtgggagggggcttgcccccgatagcggtggttcaatcaactcaggcattggctgacacaccgtcatcgggggcaagccccctcccacacttggaccttcattgttctcagaaacggggttagcggtagatatcttcccgcgtccacggcaggtcgtggctgccatcggcatggggtttcaccgccaggatctggtgcaggttgatccagccccgggcaaacgcgtacgcacaaccggccaggtacagccgccagatgcgtaacgcctgctccggcaccatcttcgccgccgcttccaggttgtcttccaggcgctcgctccaatggtccagggtgcgcgcgtagtgcaaacgcaggctttcgacgtcgaccacttccagcccgacttcactgagttcgacggtcatcatcgccaggtgcggcagttcgccgttggggaacacataacgctcgatgaactccccggcgccacgaccgaccgggcgaccatcggtgtgcttggcggtaatgccgtggttcatcaccaggccgccttcgcgcacggcgccgaacagggtctggcagtactgcgccaggttggcgtggccgacgtgttcgaacatgcccacgctcaccactttgtcgaaacgaccgtcttgcggcaggtcacggtagtcgagcaattgcaggtccacctgatcttccaggccctcggccttcacccgttcccgggccagtgcgagttgctccttgctcagtgtgatgccaaacactttgaccccgaactcccgcgcggcaaaccgcgccagcccgccccaaccacagccgacatccagcagatactcgcccggctgcagccgcagcttgcggcacaggtggcgaaatttgtcttgttgcgcctggtcgatggattcgctgccggtttcgaaataaccgcaggagtacgccatatcctggtccagccacagctggtagaactcgttggacaggtcgtaatgataggaaatggccgctgcgtcggtggccttgtcgtggatcgagcgcaccggacgactcccctcgtcgtcttcgatcagggcatgactcaattcgtcacacacccggatgacctcggagatagagccttccagctccagtttgccctcgacgaaggcttcgcccagtgaatcgagcgtgggatgggtcagcttggtcacgaccgtggggtccttcaccacgatggtcacactgggctcggggcccaagttgaattcatggccgtcccagagtcgaagacgcagcggtagctgaagattctgtaaggccggtggaagttgcgcgagcatgagtagtccccccttgtttcagacgtctgctgtgagggtagaccatcccaagacaaagtaggaggctatcgatttgatagccgtcttctatggggctcggcgctcgagcaaaccgtcctggacccactgtttcagccacgtcacggcctgcagtggggcaccctctgcataagtgactgccagttccgcgcacagttctgaaaaactccagccggtggtcaccatgcctgccagggcgcagacttcagcgggttccaggctgcggtaatggcacacattctggtgccgccacaccaggcagatgtgcgccgggtcgagcgtatggctgtgggggaagtctgagtcatccttgctggcgcgccagatcgccacggtattgaagtggcagaggacctgttgcacggagggcgccagcgtgacttgcaggcccggccagtcttcaggcgccaggcttgccatgtcgtggagggtcagcggttcgccctgcggcgcatcaaacgccagggtaaacgcccactccaaccgcgccagctccgccagcggcgcactttgctccgccaccaggtgctcaaggataaacgtcgggaaacgctcacccaaccagcgcaggctgtaatgggccgagggataacggcgcacgtaggctttggtcagcgcggcgaattcatcatcccccaaccaatagtgaatggcgctgaagtcatgccgcaagacgtcctgcaaccgcgagatataggcgttgtgataaatcgccaggcccgtgtccacatccagcgtcggcccgcccagcagggtcgcggcgaagccactgttggccacgggtgtttcggataacaggtgctgttcaaaggccaactgccaatcggtcaggcgcataaaggtctcctggccaacgccatggcccccagctcacgggccttgctcagctcggtcagcaactcttcgaagggtgggaaatggtcgtcccgctccaacagcgtcgacacagggcccaggtgctccagcgtttgttgatagagcgcccacaccgggtcacacacagggtggtcatgggtatcgaccacgtagtcgccgtagtccatgtgccctgccaggtgcagctggcggatgctctgcggcggcaggttgcggataaacgtccaggcatcgaaaccatggttgcgcgagctgacgtacacattgttgacgtccagcaacaactggcaccccgacaggtgggccagggcgttgaggaattcccactcggtgaattcatcggccttggagcgcacgtagctggagacgttttccagcaccagcggacgttccaacacatcctgcacttggcgcacgcgggcggccacgtggtagaggctttcttcggtgtaaggcagcggcagcaggtcatgcaactggtgggcgctgccgcggctccagcacaggtgatcggacacccacgccggctggatacgctcggcgagctgtttgatctgcttgaggtagtcggtatcgagggcatgcggcccgccgattgagagggacacgccatgcatcaccaggggataacgctcggctatcgcatccaggtagtacaaggctttgccgccctggaccaggtaattttcggagattacttcgaaccaatccacggccggcgactgttcgaggatctgctggtagtactcactgcgtaaacccaggccgtaaccgaggcttggaagggaggcaggcataagacactcctgggaagtgtccgcagcggtgaggggcagccgctgcgggagcactgggttgccggttattcgccgacggtgccgcccttggcgtcgcacatcgacttggtcatcgacaggaagccctggcctttgcaagaaccctgacctttgcacgcatggtccttggtcttgcagtcgttctggcctttgcaggcgttgacgccatagcagtgaacggtggcgtctgcagcctgcacctgggtggcaacaccggcaaacatagtggcggcagccatagcgagagcggcaccagcagcagcggatttgatgttcattgttgtgttcctcatgatcgtaggggtgtcggtctgaacggattgttcagtctcgacataccactagagtgaggcccctcatccgcgttacagctgtgtgcaaaaatttctgaaaattattcttcaagcttcaaaaggggttcctgaaagcgcagcaaacgcccggcattgcccagtaccagcaaggtactgaggttatgcaacaccgccgcaatcatcgccccggcagcgcccaaccagccaaacgcggcgaatatcacgatagccaaggtccagcccagaccgatgatcacgttgacctgcagcgtctgccggcactggcggctcaagcgcacgcacgtccccaggcgccgcaagtcactgccgatcaacaccacatccgccgacgccagggcgatatccgccccgcccgcgcccatggccaccccgaccacaccggccttgagcgccagcgaatcgttgatgccatcgcccaccaccatcggccggaaaccgctgccgatttcacccagcacgcggttgagcttgtcttccggcagggcctgggcttcgacgtcgctgatgcccacgtccagcgccaggctgtccgcgacgctctggcggtcgccggtgagcaacagttggcgaccaaggccgaggtcacgcagctcttgcagggcctggcgggcttccggcttgacgctatcggccagcagcagccaggccaggaactgaccgttcaacgccagcccggcgatggggccatcgtggttcggcaccgcggtggtcaagatgcccaactgctcgaataactccgggcggcccaaggccgcttcgccctgatcggtctgcgccaccacgccgaggccctggcgttcgcggatgtccgtcaacgccagcatttgttcctgcgtcgccaaccccgccaatgcccggctgaccgggtggctgctggccgagcccaggctcgccgccaggttcaacagtacctgccggtccggcgccgtggtgtcgatggattgcaggcgcaaggtgccaaaggtcagggtaccggtcttgtcgaccaccagcgaggtcaggtccgccagctcttcgaggaacgccgagctgcgaatcagaatcccatgccgcgccgccacggcgatcccggcaatcgccgtggccggtgccgacagcaccaacgcacacgggcacgccgccaccagcacggcgagcatcgcctgggcgtcattggtcacaaaccaagtcaccgccgccaacagcagcaccagcaccatatagctgccggcataccgctccaacagccgcgtaatcggcggcttggaacgctcggcgttctgcatcagcgcgatgactttgcccagggtggactcgttcccggtgcgggtcacttgcaggcgcagcaacccatcgaggttgatcgccccaccaaacacctgcacacccacgctggcttccagcggtaccgactcaccggtaatcggcgccgtgtccaggctcgcctggcccgacagcaccacgccatccgccggcacccggtcgccggcacgcacctcgacgatgtcgccggtattcagcgtgccgttgtccacttcctggatgctgccatcggcctgcaccaaacgcgcatggctgcgggtcagcttgcccagggcatggatcgcctcctgggaaccgatcacgctgcgttcttccagcacatggccaaaaatcatgatgatcggcaacaacgcggcggtcagcaggtcacccgtagcccaggcgcccagcatggcaagagcgatcaactggtcggtgataccgtgcaggctcgggaaccgcaggctgtaccaggccgaacgcatcaccggcaccgccaccaacagcgacgcgacacccagcagcaactggctcacgccgctctggtccggcgccagccagcgccacaccaggcccagcaccagcaaccccagggccagcatggccagggtcaattgccgggcagcactgcgttgctcggcggaggtcagcatgggtgcgctcattgttcggctccctggatgatcaagcgggagtcgtctttcggatcgaccgtggtcaccgaaccggcctggccgagaatcttcggcaggcgctcgcggtacaggcgcagcagcaagcccgggtctttcacctgggccaggctggcgaccgtggcggtttgcgcctgggcattggccaggcgttcactggcctgggcatgggcgacttgcaccaggcggtcggcctgctgggtcgcggtctgggtgagtttctcggcgtcggtgcgcgcgttggccacggctttatccgcctgctggctggcggtgagcaccgcattgaaggcattcaccgccgggcccggcaggctcgactgcacgtcgacgcgggtcacttcgatgcccaaccccaagcctgtggaagccaactccacgagacgcttattgatgccttgcaccaggtcgccgcgcagccgttcgcgacgttcggcggcgccgttgtcggtgccgatcagttcggggcgtgccaccaggatcgtatccaggtcacgcgcagcggtcagggccacggcgctgcgggtcaccaaccgatccagggccggcagcacatgctcgccctgcaacacaaaggcgtaaggctcggtgactttgtagaacacccgcacatccagctgcaccacgccggcatcgccagtcagcaggtaaccggaaccggccagtgcatcactcaacggcgtggcaaaactggcgacgcggtcggcctgggtcgccgcatcggaacgcaacaggttctccacccgacgctcgatcacccggtcggccgccggcaacagcaccacctgctcgaacggccgcggccaggccagcaacagcccggcattctggatgcggtcgagggcgccgaagtgcagcaccacagcgcggttctgcgggtcgatctggcgcacattggaaaacgcccaggccagtgccgccaatacagtcaccgcatacagcgccaggaaggccaggcgcccggcctggatccacgggctgtccgggctgtcacgctcggtcatggctggatgtccttcggcccatccaccaacgcgcggaacggtgcagcgtcggtgcgcaggatgatcttggtgcccggcgtgaccacggtgcccaaggtatccagcgagcgcagcaggttatacaactgcggattgccggcgtaggcgcggccatagatctgcgcggcttcgacccgggactgggcctcgatatcggcggctttcaccgtggcgtcggcctgcacgatgcgcgcatcgcgctcggcggcagagcggatctgcgccgcctcgcgtttgcccacggcggtacgttcggtggcgatggtttcacgctcggcgcgcatgcggtcgacggtggccgtcagggtcaccgacggcagcgtcagccgttcgatcccgacctggaccacgcgcacgccgtaggtattgagcaattgttgatcaatctgctggcgcagttgtgcttcaaaatcagcgatgcgcacctggctggcatcggtgttgatcaggctagacaggtcgaagctggccgccgtggtttccagcgccgagccgacaaaggtgcggatctgccgcgccgcttcatccggctggttctgcaccgcacgcatgaagcgctgcacattatccgcatcgccctgcacctgccacgccacgtacgcctgcacgatgatgcgcaggccatcgcgagtgcccacatcctgcaaaccgctggaggtggtgcgcaggcgcaagtccaccgggatcgccgcttcgaacggcgccggccaacgccagcccaggccgggctccagcaacacccgcgccgggttgccgaaccgggtaatcaccgtggcctcgccggaccgcacctgcaccaggctggcggccgcgaccgcaaacagcaccagcaacaccgcccaggccatgcgccgccaggggaatgggccggcgtgctcatcagcgtgatgatggtggtggtgatggccatgatgatgaccgtgatcgtgagaatgagcgctcaacggaccgactccttattgaacggctttacgcggctgcgaaggatcggccggcaaggtaaaagaacgcagatcgatcgttggcgcgccatcggcgcccaggcgatgatccaggataagcagcttggcgtgggccaggccctggctgagttgacccaagtactgttccagcacgaacgcctggccggcggtggcgtaggccttttgttcggcggcaaaacgcaggtcggcggcctgggcgccggcgttcacttcgcgggcggtggccgtggcctggtcgcgggcggtgctggcttgcagcacggcctggttggtttgctcgctggccgcgccgcgctcgcgggagatcagcgcctgggctccgatctgcgcggcttgcacgccgtggtaggcgttggcagcgccggccggtgggtggatcgcctcgaccaccgtggcgaggatttccacaccgctgccgagcgtttgcaggtcagcctgcacggcgcggccgatttcgtcggccaggttcgtacgttgctcgccgagcaattcgtcaagggtgcgcgaggcaaagtcatgcaccaggatgcggctggcggtgctgcggatcaggctcggcacattggcgctgttataggtggcagcgagcgcggcctggtcggtgaggccgatgcggtagacgaaacgcacgtccatgttgacgatctggaagctctgcttgtcgccgctgctgctggcgatcacctgggacttgtcgttcacatgactggcgtcccacaagcggttggcgatcagcggcgccgggccttcggcaggcgccaactccggcgtagcggcgtcgctgacgctggtggccagctcatgcaccacgccgttctcgacgctgatcacacgacccaacggccagggcaagccagcatgcaaaccggggccgaacacctcgacgggcttgccgaagcgctcataaatcccacggccttgcaggggcacttcgtgcacgccggtgagcacccaacctaccgccagcaccaccagcagcaccggcaggaacgcccggcgcatgtaggtaaacgcccagatctggcgcaggtcgatgccgaagcggttgtgcaattcgtgctgcaaggcgagcaagggttgaggcggccagcgcagcagcccggcgatgaaactgtgcgccatcaggcggggctcaaggcggggctggcgtgggctgaacagcgacaacacggccctcagtacaaactccagcgagaccagtgccggcagcaggccgatcaacaccgccaggcgcaatggccagatggactcggcaccagcgaacagcaggcaaatcgcgctgactaccaggcacacaatcgccacccgactcaactgcgcgagctgcccggcttccggccattgcgcggcggtttcctgggccaggcgacgttcgaacaccagcaagccaaacgccagggccaacgccagcgcggcgccgatgctggcagactggccgaccggtgcagcgggcaaccccaggttccagaactcgacaatgctgatcaacgccagcaacgaccagccaccaagccacaacacgggtgcgccgatctgcttggcaaaacgcagcataaagcgtgcatagcggccggggtcttcaagcggcacttcaaccgcaggttcttccaacgcttgggcgcgccaatccgccacccaccacgccgactgcagcccggccaccagcaacagcaacgccgatgcgcagttgatcaacaccaccggccagatcgacagcggcgcaaacagcgcgacaaacagcgccagcacccaaccggcaacggccagcaccgtcaggctgataccggcctggcgcaatcgacgggcatggaactgcccttgttgaaaacgcggaaggccttctaccgaagcaccgtcagtttccagatccacttgcatccactcaacgcccacgtgtacataattcgttacgatataacacggagcgtgaaatttttgttcgataaacatcgcgttaagcggtacaccgttcccctgtgggagggggcttgcccccgatagcggtgtgtcagtcaacaccggtttcaactggcccatcgccatcgggggcaagccccctcccacatttgatctcccgcaccgtcaagatcgtgactaaccccccagaaacacgcgccatcactggtgcaggcgaggattaatcggcacactccaaaacagtttttcgcgggtccacggacaaggaagcgtcaccccccatgatttcgatctatcagctcaaaccgcgttttcaaaacctgctgcgcccactggtgcagcgcctctacgacaatggcaccaccgccaaccagatcaccgtcttggccggcgtggtttcgctgctggtcggcctgctgatcgccagcttcgccacccacctgtggctgttcgcgctgattccgctgtggatgatcctgcgcatggccctcaacgccatcgacggcatgctcgcccgggaattcggccagcagtcgcgtctgggcgcctacctcaatgaactgtgcgacgtgatcgccgacagcgcgctgatcctgccgtttgcgctgatccccggtgtgagcctggcgccggtgctgctggtggcgctgctggcggtgttcagcgagtacgccggtgtgctggggccgatggtcggtgcatcgcgccgctatgacggtccgatgggcaagagtgatcgtgcctttgtactcggcgtattggccaccggtgtggcactgggctggctgggcgccggctgggtcgacgcggtgatgtggctggtggctgccctgctcgcctacaccctggtcaaccgggtgcgccagggccttaaagaacaacaagaaacctcaccgattgcataaggacttttgcgatgcgcgaacagcagcagcacaccttcagtacccatgatggcgtcgagcttttttatcggcactggccggccacggaaaacaccggccagcgccaggccatcgtgctgttccatcgcggccatgagcactcggggcgtatcgcccacttggtggatgagctgaacctgccgcaattcgacttcttcgcctgggacgcccgtggtcacggccagtctcccggcgagcgcggtgacagccccagcttcgccaccagcgcccgcgatgtgcagaccttctgcgaccacatcggcgccacgtatggcatcaaggaagaaaacttcgccgtcatcgcccaaagcgtcggcgcagtgattgccgcgacctgggtccacgattacgcgccgaaaatccgtgccctggtgctcgcctcgccggcgttcaaggtcaagctctacgtgccgttcgcccggccgggcctggcgttgatgcgcaagttccgtggcaactttttcgtcaacagctacgtcaaggccaagttccttagccatgacccggagcgcgtggcgtcctacgacagcgacccgctgattaccaaggccatctcggtgaatgtgctgctgggcctgtacgaagcggccgaccgtgtggtcgccgatgcccaggcgatccaggtgccgacccagttgctggtctccggctccgacttcgtggtgcaccgcaaaccccagcagcagttcttcgaccgcctgggcagcctgaaaaaagagctgcacatcctccccggtttcttccacgacaccctcggcgaacgtgatcgcgccagcgccgtgagcagcgcccggcgcttcatcctgcagaacttcgaacacccgctggaccgcgcttcactgctggacgcggacaaactcagcgccacctgcgccgaatccgaagcccttgccgcaccgctgccgcgcaactccctgcgcgacctctactggcgcatgacccgcgccagcatgggcttgggcaagaacctgtcggacggggtgaaactgggcttcgacaccggtttcgactccggcagcaccctggactacgtgtaccgcaacacgcccaccggcaagggcgggctggggcggatgatcgacaccaactacctcaactccatcggctggcgcggtattcgccagcgcaagctgaatgtggaggagctgctgcgcctggcgatggccaggttgcgcggtgaagatcgtgaagtgcgcatcgtcgatatcgccgccggccacggtcgctacatcctggaagccttgcagggcgtgtcgccactgccggaatcgatcctgctgcgcgactacagcgacatcaacgtgcgcgacggtggcgcgttgattcgcgagaagggtttgggggatatcgcgcagttcgtcaaaggtgatgcgttcgaccgccaggacctggcggcactcgaccccaagccgaccctcgcggtggtgtccgggctgtatgagttgtttgccgataacggcatggtcggcggttcgctggccgggctggccgaagcggtggagcccggcggttacctggtctacaccggccaaccgtggcacccgcagctggagttgatcgcccgcgccctgactagccatcgccagggccaggcctgggtgatgcgccggcgcagccaggcggaaatggatcaattggtggaagcggctggtttccgcaagatcacccagcgtgtggatgagtggggcattttcaccgtgtccctggcacagaagatctgaacatgcgcgaacccggtttattgaaacctgcggtgctgtggctgctgctgttggcgccgctgttcttcagcacctacggctttgccacctgggtcaccagccagcgcagcgacgtcgtcacgctggtgttcggctgggaaacccatatgccgttctgggcgtggaccatcgtgccctactggtccatcgacctgctctacgggttttcgctgttgttgcccaacacccggcatgagttgaagcaacatgcgctgcgcctgctgagtgcccaggtgatcgccgtgagctgcttcctgatctggccgctgcgtttcaccttcgaacggccggaactggacggtgtgttcggctggctgttcgcggtgctggccgggttcgacaaaccgttcaaccaggcaccgtcgctgcatatcgcgctgctggtgatcctgtgggtcatgtaccagcgccacacccaaggcttttggcgttggctggtgcatggctggttcgggttgatcggcatttcggtgctgaccacttatcaacatcactttatcgacttacccacaggcgccctcgccgggtggatctgcgtgtggttgtggccggtggaacatccgagcccgttgttgagtgcacggctgacgcgagatcccacgcgttggcggttgggcatgcaatatggacttggcgcgatgctgttggcgattccagcatttgtattgggcggcgcctggctgtggctactatggccggcggttgccctcgccttgatcaaggccaattacttcgtgctgggcgcttcgggcttccagaaacgcaccgacggccaactgacccccgccgcacgctggctgtacgcaccgtacctagccgccgcctggatcaactcgcgcctgtggacacgcaaacatccacagcccgacctgattgtggataacgtctggctcgggcgtattcctaccacaagcgagcaagcgcccttcaaggccatcgtcgatctgtgtgccgaattgccgattaatccacaggggcgcgcctatcaatccatccccgtgctggacctgatcgcaccgaccccgaccgaatgcctgcaagccgcccaagctatcgagcatctgcgcgccagcggccccgtgctggtgtgctgcgccctcggctactcgcgcagcgctaccgccgtcgccgcctggttgctgcacaacgggcgagccgcgacggtagagcaggcgctgactatcattcgtacagcacggaccgatgtggtcctgcatcccgcacaccgagaagcgttggagggtttgccccatgcccgctgatatggaactgctggtggttgccagcctgctgcgtcgtggccgttcgctggatcagttatccacaggcctgaccctggccggtgtgctgttcggcctggcgcagttgttgatggcgagtatttcgatcatctgcctgctgctcagcctgtggatgattatcctcgggctgctgcaaaagtactgggcgctgcgcgtggcgttcgacgccgacctgttcgccctgctggcccgcgacatcgagcgcacgccggacctcgaccaggcactgctgaccctcggcctgcaatcggccaagcgtatcggccggccctggaccgaacgccgtcgcggcgccctcaaactattgcgcaaacaagcctggctgctcggcgcgcaagcgctgctgaccctgggcgtgatcctcgccagcccctggctgcctttcgccggataaggaatccccatgttcgaacccgtggtcgccacgctgattacctccatggcccgcaccgtcaccggcgcccgcagcctgtggttgggctgcgcgccggtgccagtgcaacgcatctacttcgccaaccacagcagccacggcgactttgtattgctgtgggcgtcattgccgcagaacctgcgcaaattcacacgtccggtggccggcagtgattactggaacaaaagcgccttgcgccgctacatcatcaaccgcgtattcaacggcgtgttgatcgaccgcgaacgcaaggaccctgtggataaccccttgcagccgatgctcaacgccctggaaggcggtgactcgctgatcattttcccggaaggcacgcgcaacctcgaagacggcctgctgccgttcaaaagcggcctttatcacctggcgaaaagttacccacaggccgagttgatcccggtgtggatcgccaacctcaaccgcgtcatgcccaagggtcgcgtgctgccgctgcctttgttgtgcaccaccagcttcggcgccccgctgcaattggcagacggcgaagacaaagccgccttcctcgcccgtacccgcgatgctctgctcgccctcgccccggagcacgtctgacatggctagccaaaccctgatgttgttcggcggtatcggcgcgatcctggtgctagcctcgctgatcggcctgatcctcaagctgcgcacccgtggcacgcccaacacggtgatcgacaacctcaacgcccggatcaacgcctggtgggtcatggtggtggtcatcggcatcgccttctggctcggcaccggcgcggtgatcctgctgttctacgcggtgtcgttctacgccctgcgcgaattcctcaccctcacccccacgcgccgcagcgattaccccgcgctggtcgccgcgttctacctggcgctgccgctgcaatacctgctgatctattcggactggtacgggctgttctcgatcttcatcccggtgtacgtgttcctgctgctgccgatcctcgcctccctgggcggcgatagcacgcacttcctcgaacgcgcctcgaaagtgcaatggggcctgatgatcgcggtgttctgcgtgtcattcgtgcccgccctgctcaccctcgacattcccggctacgaaggccgtaacctgctgctgatcgcctacctggtgatcgtggtgcagctgtcggacgtgttgcagtacgtgtgtgggaagttgttcggcaaacacaagatcgcgcccaacctgtcgccgtccaaaaccgtcgaaggcttcgtcggcgggattctgctgtcatccctgatcggcgctgcgctgtggtggaccacacccttcaacccgtggcagtcgttcctgattgcactgctgatcaacctgctcggctttgccggcggcatcgtgatgtcggcgatcaagcgtgatcgcggcgtgaaggactgggggcacatgatcgaagggcacggcgggatgctggatcggctggattcggtgtgctttgcggcgccgatcttcttccacttggtgcgctactggtggacctgaagtcaccgctccaaggccaaataacgatcaacatgtgggagggggcttgcccccgatgacggtgtgccagacaacacatgggtagctgacacacagcaatcgggggcaagccccctcccacattcgttctgtggcactgtgccgaaaggttgaatcattccctcaaggctgccggctccctgatggaaatgcccgcgttttcgttaacgtttttcgcgagcaagctcgctcctacagtgattcaccgccattagcccggcaaatgccccagcggcaacgtccctggggttttcacggtctggatcgcgaagttgctgcggatgtccctcacgcccggcagcttcagcaaactacccgtgacgaaccgctcatacccgcgcaaatccggcaccaccacctgcaacagaaagtccgactcccccgacaccaggaacgccgagatcacttccggcaacgccgtcaccgcctcgcggaaggcattggcctcggtgtcgttatgccgctccaccttcacgcccacgaacaccatcatccccagtcccacttcgtcacggtccagcgtggcctggtagccgcgaatcacgccggcttcctccagcaggcgtacccgtcgcaagcaaggcgaggcagacaggccgatttcgtcagccagttgcacattgctcaagcggccgtcacgttgcagggcttcgagaatcttgcggtcaaacgcatcgagtttcagatttggcataaatgaatggccgatcagatattcagtggcagagagtgccaagactagacgcttttctggctgactacgcaagcacctgccccgcccttgcgccctagaattggccgacacacaaggggggtgaaacatggcggaactctggttattcctggtggctctttcggtggcgtatctactgccggggccggacatgatcctgctgctgcaaaccggcgcacgccagggcaaggccttggcgctgaccacggcgattggcctgggattggcccgcgcctgtcatgtggcgctggcgggcatgggcttggcgacgttgttcaaagtggcgccctggaccttcgatgtggtgcgcctgggcggcgcggcgtatctgctgtggcttggcgtgcagtgcttgcgtgcgaacatgctgccggtactcgacacggcccatagcgccacaccggcccgcgcctggcgtgcagcctttcagcgcggcctgctcaccaacctgctcaacccaaaggccctgctgttctgttcggtgctgctgccgcaattcatcaacccgcaatccggccccgtggcagcgcagttcgcgttgctgggtgtgatcctggtggccgtcggtttcgccttcgactgttgctacgccctggccggggcgcgcatcggtcagtggctggcacgcaatcgctcggcgcagcgtgtgcagcagtggttattcggcagtcttttgatcggttttgcggtgcgcctcacctttgtgcaacacgcctagcgggtcggcgtatctgcgtcatcttttgtatcaaagacgcgtgtaagatacgccgcacttagccagggatgctcaccatgttcgattcgttcaaagcgatcagccgccgtattgtcggtgcgttattgactgtggtgggggccgtctttggccagtggcatccgccggtctggctgcgtgccgttggccgtgggctggctaacctgggcagccaagcccgcgcttatccacgtcaaaccggtgccggcgtagtaggcctggcgttgctggcggccgctggtttctatggctggcactggtattccaacctgccgcaaccacataccgcgagctattcgctgcacaaaccgaacctcaccgactacacccagcccacgccggttgtggataacttgcaggtgcgcttcggcgaatccgtggccccgctggcggccatcggcaagccggtcactgagggtatcaccctaaaacctgcggtcgcaggcacctggcgctgggcggacgaccgcagcctgttgttcgtcccggaaaaagactggcccatcgacgcccattacaccctcgacctggcgaagaaaaacctgctggccgacggcgtgttgctggaccagtacagcacgcagttttccacccaaccgttccgcgccaccctggcgcaaaacgagctgtaccaggacccgtccaacccgacgctgaaacagctggtggcgaccttccgtttttcccacccggtagatgaagacagcctacgcaagcgcgtcacagtaaccctcggcaaaggcttggcctaccgcgacgcccagttgcccaaccggccggaaatcaccttcgacgagaagaaactcaacgcctacgtacgctccgctgccctggccacgccgctggaaagcacgccggtcaacgccaagctcgacgaaggcatcaaggcccgcgacggcggcaacgccagcaccgcaccgctggtggcggaagtcaccgtgcccggtcgctatcgcctgacctttaccggcgccgaagtgagctttgtcgacaaccaacgtggcgagccggagccggtgctgatgttcagcagttccagcgccgtggccgatgagaccatcgccggtaaggtgcaggcctggctcctgccggaaaaagcccaggacgacacgcgcccctacagcagcaacgacatcgatgacgccctgctcgcccgcagcaccaaaatcaacctgacccacgtgcccagcgtcgagccgctgaacaccctgcacgccttcaagttcaaggccccggccggtcgcgcggtgtatgtgcgcgtacccgccaacctggaagccatcggcggctacctggcaaaaaatcctacggcgtcgctgatcagcatgccggcgtatccgcgtaccttgcagttcttgtccgatggcgccttgctcagcctcaacggcgaaaaacgcctgggcttcatggcccgtggcgtgcccggcgcccatgtggaaatcgcccgcctgttgcccaaccaattgcaacacctggtggatcagagcagcggcagctttgcccggccgaacttcggcaacgaatattttgatcgcatggtcgagcgtcaggcgttggatatcccgctgtcatccaatgacccggcgaaaaccgtctacgacaatgtcgacctcagccactacctcacggccaacggcggtcggcgcggcattttcgtgctcaagctcagcccgcaggacgacccggccacgcgcacgttcgagtacgaccgcagcagcaccagcgacctgcgcttcatcgtggtgacggacctgggcatcatcgccaagcgctccagcgatggcagccatgacgtgtacgtgcagtccatcggcaatggctcgccggtgtccgatgcacaagtggacatcatcggtcgcaacggtttgccggtaagcagtggccgcaccgacgccgaaggccatgcgcacttcgccaagctggatgaattgcgtcgtgagaaaacgccgctgatgtacgtggtcacgcgcggcaatgaccagtcgttcctaccgatcgcccgtcagtcccaacaattggatttgtcgcgtttcgacgtcggcggcctggaagaagacggtgcgattgatcgcctcagcgcctacctgtttaccgatcgcggcctgtaccggcccggcgaaaccgcgcacctgggcatgatcgtgcgcagcggcaactggaagggcatgctgcaaggcctgccggtggagctgcaaatcaccgacccgcgtgggctggaggtgattcgccagccgctgaagctgtccgccagtggctttgaaacctttgatttccccagcagcgaagtcgcccccgccggggagtacaccgcgaccttgcagttgattggccagaaacagacccgcaccgacctgggcagcgtgagcttcaaggtccgcgacttcgagccggaccgcatgaaggtcagcctgagcctgcatgacacgccggtgcagggctggattccaccggaccaagtggtggccaaggtcaccgccatgcacctgttcggcgccccggcgtccggccgacgcgtgacggcaaaaatgtccctgagcccaacgcttgcggcctttgatcgctacccggattaccgtttccgccttaacgatgccctggaagacgccacgaccgaagacctggccgaaaccaccgtcgacgacaacggccaggccgtgctcgacctcaacctgcagcgcttcgccaacagcacctatcgtttacaggtgatgacccaggtgttcgaggctgaaggcggtcgcaatgtggcggcgcaaagtgccttgctggtgtcgtccgcgccctacctggtgggtgtgaaaagtcaggattcgttgtcgtacgtcgccaaggatgcaccgcgccaagtgcaatggctggctgtcgcgccagacctgacaccgctggcggtggacggcctgaccagtgaagtggtcgagcaccgttatgtgtcggtgctggtgaaacagtccaacggcacctacaagtacgagtcacgcatcaagaacatcagccagcccgcgttaccgttgctgatgacgaaagaaggcgccaagcagaccctgaacacctcagcgccgggcgactttaccctgcaactcaaggacgccaacggcaacctgctgaaccagatcgactacagcgtggccggacgcggcaacacctcgcgctccctggaacgcaacgccgagttgcaactgcgcctggataaacgcagctacgccaccggcgacgagatcgctatcagcattcgtgccccgtacaccggcgccggcttgatcaccatcgagcgcgacaaggtctacacccaacagtggttcaaggccgacagcaccaacagcgtgcaacatatccgtgttcccgcagggcttgagggcaatgcctacgtcaacgtgcagtttgtgcgcgacatgggctcggccgaggtgtacatgagcccgctgtcctatggcgtggtgccgttcagcatcaacctggatgcgcggcgcatggccttgaaggtggaaggcccggcgaagatcgaaccggggcagacgctggatatcaaggtcaacaccgaccgcccgggccgggccgtggtgtacgccgtcgatgaaggcatcctgcaagtggcgcgctatcagacgccggatccgctgggcttcttcttccagaagcgtgcgctggaagtcggcaccagtcagatccttgacctgatcctgccggaattcagccgtttgctcagtggggcggcgccgggtggtgatacggaaggtgcgctggccaatcacctcaacccgttcaagcgtaaacatcagccgccagtggcctggtggtccgggctggtggacttgccggccggcgaaaccgtgctgcattaccaggtgccggacagcttcaacggcaagctgcacctgtttgcggtggccgtggacagtgacagcgtgggtgtgagcgaagccagtaccgacgtacgcgggcccatcgtgatcacgccgaacgtgccggcctttgtggcgccgggggatgtgttcaacgtcagcgccggggtgttcagcaacctcgacgcagcggcggacgtgaagtttgaagtgcagaccagcaacggtctggtggtgcagggtgacaagggcagcacgctgtctctgcaaccgcgcaaggaaggcacggccgagttcaagatcaaggtcggtgacaccctcggctcggcggatttgcgctttgtcgcggtattgccggatggcaagcgcattcaggtcgcggaaaccacctcgatccggccactgagcgaacatcgcgtcgccctgagcctgggccgcttcgacagcgccagcaaagagctgaaaccgacccgcgaactgttcagccaactgcgcgatgtgcaactgggtgtggctgcctcgccgctggtatgggctaacggcctcaagcactacctggacgactacggctatgcctgcaccgagcaactggtgtccaaggccatgccggcgttgatctggggcggcaatgcgcctgaagccgagcaagctttcggcagtgcggtacgcatgctgcgccagcgtcagaaccaggccggtggctttggcttgtgggcggccaaccccgatgtggcgccctacgctagcctctacgccaccgacttcctgatcgaagccaaggagcgcgggctgccagtgccggaagacctgctggtgcgctcgaacgcgtacctgacagacctggccaacggtcctagcgaaggcctgtcggaattgcgcaaccgcgcctacgccagttacctgctgagccgtcaggggattctggtgagtggtgcattgagcgatatccgcgaacgctacgaaagctacttcaaggacagctggcagaacgacctcggcgccgcttacctggctgccagctacaagctgctcaagcaggatcgccaggccgataccctgttccgcaagattccatggcgttcccttgtggataagtgggacagcgacggtttgtactacgacccgctggttcatgacgccgaacacctgcacctgttggcgcgacatttcccggagctgatggacgatgtgcctgcagcgctgctggataaactcggcaagcgcctcaacgagcagcgttacaactcactgtctgcggccctgctgctgcgtgccctggacaactacggccagcgtgcgcaaagcgacatgaccctcaaggccactgcctggctgggtgacaagcagcagcaattgctggaaatggccggtcagccaccgcgcgccgccgtgccgggcgccacgcaaaagctgttgatggaaaaatccgacggcccagcggcgttctacatgctcagcgaagccggtttcgacaagggcgccaagctcaagccgatcaacaatggcctggaaatcatccacgaatacctcgacctcaagggcgagccggtgagcaaggtcgcggtgggtgatgagttcctggtacgcctgcgcctgcgcgctaccgaccgcgatcaggtacaacaagtggccgtggtggacctgctgcctggcggtgtcgagcctgtgtataacttgccgccggagccggaagacgccagcacggaggaaagtgagggcgaagagtccgagtacgtggaagcagacaaccaggaagaacaaagctggcaagctcccatcggggaaaccgagctgagcaactggcagccggagtatgtggatgtgcgtgatgatcgcgtggtgttgtacggcaccgcattgcgcgatgtaggcaccttcgtctaccgcgtgcgcgccaccaacgccggcaccttcaacacgccaccggcctacgccgaaggcatgtacgaaaccaccctgcaagggcgcggcaaagtaggccagcttgaaattaccaagccttaaacgcctggcgccgccgctgcttgtagcggcggtggggctggtggggctgcggctttggccgcatgccccgctggaacacgcggtcacttcatcgcgggtggtgttggccgacgacggttcgctgttgcgcatgacgctggcggatgacggtcaataccgcctgtggctaccgctggagcggatctcgccgtcactggtcgaagccttgctgctcaaggaggaccgcaatttctactggcacccggggatcaatcccccggcgttgctgcgcgcggccacggccacctacagcggtggccagcgccagggcggctcgaccttgagcatgcaactggcccggcgcctgtgggacctgaacacgcgccaggtgccgggcaagttgcagcagatggcgctggcgctgtggctggaggcgcgctacagcaagcacgacatccttgaggcctacctgaacctggcgcccatgggcggcaatatcgaaggggccgaggcggcgagccgcatctacttcggcaagtcggcggcgcagttgtcgttgtccgaagcgctggcgctggcggtgattccgcagcagccggggcgtcgggcgcgcttcgggccgtcactgcaacatgcgcggctgcgcttgatggcggattggcgcgagacttatccacaggacccgcgtaacgacagcctgctcgatttgcctttggaagcgcgtaaccgccagcagatcccgttcctcgccccgcacttgagtgaacaactgctggcctcccaaaccggcaatgagctgaacagcaccctcaacctgccgttgcagcaattgctcgaacgcctgatcaccgggtttatcgccgagcggcgcagcacaggggtggaaaacgccacggccatcctgatcgacagccgcgaccagagtgtcaaggcactggtgggttcggcggattacttatccacaagcctgcacggtcaggtcaatggcgtgctgtcgcgacgctcgccggggtcgacgctcaagccgttcctttacggattggcgctggatcagggggtcatccaccccatgagcatccttaaagatttgcccagtaacttcggctacttccaaccggaaaatttcgacggcagttttgtcggcccactgacagcgcgagatgcgttgatccgtagtcgcaacattccggcggtgtggctcgccagccaggtcaaatcgccctcgttgtatggactgctgcaacgcgccggcatcaagggcctgcgcgacgagagtcactacggcctggccctggccctcggtggcggcgagatgagcccggaagaactggcgcggctgtatgtgatgctggccggtgacgggcacctgcggccgctgcgctatttgcaggaacagccgcagtccaccggtgcgccgttgctcacgccccaggccgccttcatggtgcgcgacatgctgcgccgtaatccacgcccggatggcctgcccggccgccattggcgcactgcctggaaaaccggcacctcctggggctttcacgatgcctggagtgccggcctggtcggcccttacgtgctagtggtgtgggtgggtaacttcgacggccgcccgaacccggcgtttatcggtgccaagaccgctgcgccgctgttcttccgcatcgccgacgccctgcccctggccttgcccaacaccgtcatcaagcccgacaaaccgcccgccgggctggtgcgcatcgacgtctgcgccgcgtccggcgaactgcccaaccgttggtgcccgcaaacccgcaagacctggtacatccccggcatctcgccgattcgcgtgtccaacctgcaccgcccggtgctgatcgacacccgcaccggcaaggccgcctgcccgccgttcgagccgcagtacacccgcgaagaagtcttcgaattctggccgagtgacgtgcaacgcctgtaccgcgcggccggcctgcctcggcgtacgccgcccagtgtgatgaagaactgccagcccaaccgcctgagtgaccagagtgaagcgccgcagatccgctcgccgctgacccaggtgagctaccagttgcgcttgtctcaaccccaggaaagcatcccgttgaatgccaacgcggccagcgatgcggcgacgctgtattggtttgctgatcaaaccttgatcggccagggttcgccgcaagccacactgaactggcggccgggcaagtcgggggagtatcggctgcgggtcagtgatgatcaggggcgcagtgcgagtcgggggttgaaggtggagtttgtgccgtgatcaggtatcttcgtcgccgaagctcgccttgcccacacgcttggcaaaatggttgtacgccgcagccagttttcgttgttcaaagatagaaaacaccagggtacccagcaggatcagcatccacaccagaaacagcttcagcgtatccacatgggccacgaacagtagcagggtcactacgccgccaatcaccatgcccagccccatccacgcccccaacacacgacccacggccatgcgtatgcctttgggcaggaccaatcgggtggtcatcattaccatgatgatcgccaggaagaagccaaacgcggccatgaacggaatctgaaaaccaccttcgcggtacaaccaggccagcaaacgatacagcgggccgagttctaccatctgttgataggtgtccggacgcggcaaatgcaactgggtaatctgctcgggtgtgagggccatgatgcccacgccgatcattcctgcgaaggcggcatagaacccgcccgcacgccacagcggcgccagcacgcggcggctttccacatcctcggtcagcgccacaccgaacacggccttggggtatttgccctgggcaatcacggtctggccgtcccgttcgcaggcatcaccgatcagcatcacatcgaggtcctggataaggaggatttcaccctggcgacgggagctgccgatcgactcgtaatcgtcgggcgacttgttgccgaacagatcgatgccctcggcaatcacagggatttcgccgctggcatcctgcaggcgaaagtcattgcagcacgcctcgctcttggaccggctccagctccagcgcccgtcgtcatccttctcgccgtcctcgataatccacacgtagccggcgcaaggcttgtgatgcaccggcgacaacaacggcttgtccaccattaccttgccacgcagctccaccaagcccatcgccagcgaacgaatctggctcgtcgccagccgctgctcggtcttgtagaagctcggaccaaagctggccaggaggcagatcagcaggaacatcgggaaaaacaacgcgacaaccgtcatcggggcgtagatcagcaaaccgataaagcccgcaagaatcaccagcgccagcacgattttccacttcggctttttcaccacggcgcctaccggcgtggtcttcatgcccctggcacctcaagcttcacaccttcgtagcgggtttcttcggcgctgatcgccagcaacgggatgcgctgataactgagcaaccgcgcaaagaacaggtcggggaacactgcaatggcaatgttgtagaggttgaccgactcattgaagaactcacgccggtcggcaatgcgctcctccaccgacgagatcgcctgttgcagcgcgaccatgttcggtcccgagatcaacgtgggatacccctccgccaccgcaatcaccgacttgatcgccgcgttgagctggttggaggcatcgaccttgtcgttgaggctgctggcattaaggtactgctggcgagcttcactcaagcgcgtgaacagggcgttctcgtggttcatagcggtttggaccacacgcatcaggtccgggatctgatcggcccgctgcttgagcagcacgtcgatgttggcaaaggccttatctacatcattacgccgcatcaccagcccgttgtagaaccccaccatccagcccaccaggccgacgccaatgatcagcacgacgacgccggcgataaggagttcgatgttcatggtgaaggcattccctggctgagttatccacagggtcgcattctaggggtaaaaccggatcgcgcggcgggcactggcccacagaaccgacaagaggtcgctaatgggagatgcctgccctaagtgccggggctcgcttcaagtaagtgcacgtcttgttggatcagcctctcaacgaccttgcatcagctcacggtagattgtgatgtagtcggtaaccatccgttcagctgtgaaatacttccaatagcgctcctctgctcgcagcccccaaatacgtgcgtcttcgggatgctcccaaaggtattgcatcgcgcctcgtaacgcggcagggtcgcccggtggcacaactagcccagtgtcaccggatatattgataaaggtggtaccggtacctatctcgcaggaaatcatcggctttccatacatagcaccttccaataaagatatgccgaaagcttccgagcgaaggtgcgaaggaaagaccacggcataactcagctccagcagcgccaatttgtcactgtcaggcaactggccgaagaaatgcacattatccagccccaaggcgcgagcctgtgccttgagttcatcctcgattggccccgcaccgacaatgactatggggaattcagtgcctcgggccgcttccatcaggatgtgcaggcctttgtaataacgcatcacaccgacgaacaggaagaatttttgccccaccttcgtgcgccaggccttgagcgtttccggatccgcctttggataggtctcacggtccaggccgatgggaatcactgaaaccttgtctcgatagcgtgccaagactgcgctggtggccaggtagttcggcgaggttgccacgatacggtcgacgtcgcgcaagaaccagcgtttcagaggtctgtagagtttcagcagctgtttctggcggatgatgtcggagtgataagtcaccagcgtgggttttttgattctggtgatgaaatgcaccacgtccatgaagggccatggaaagtggtagtgaataacgtcagccctgcgcgcgagttgataaaagcgcaagaacgccgagatcgaaaatccggttgaggcgatttgcagatccatcctggcgtgatgcaccaggtaccccccgacatcaaccgtgcgcggaacctgtttggacgtcaaagaaagtacgtctgtctgcacaccctgcttggctgcgcccagggcgatctggtggataacctgctcgattccgcccatcgaccagggcactgaggttttataaaagtgaagtactttcatgagctccgaataatcgccgccatgcgatctacaaaggtttttttcgagaatttttcagcctgtatctcgcacgcgcatcgcatggcaagtgctctcgcaggattcaggctgttgatcgcatcgcgcaaagattccacgtccaactccggctccagcaatagtccggtcacaccgtccactatagtctctatcaagccaccttcacgtacaccgatcacgggctttccagcagacatcgcttccacgggcgacataccgaaatcttcatccgtcggcacatagatcgctgcacgcgcaccaccaatacaggcacgtaaactggcttcgctttgccaaccggtaaagtggatgttggcagcgccatcggcgagttttcgcaacgccagctcgtcccgaccaccagacgcaattaccagcttctgatcaggcaactcgagaaaagccttgataatggtatcaacccgtttatgacattccagcctcgccagggaaatgaagtaatcgccctgctctgtccatcgaaaacgttcggtatccacaggtggatgaatcacctccgactccagtcccaagtgtagacgcaggcgtttgcgcacactttccgagttggtaattacacggtccatacgcgcaagtgctccctcgtaacgccgctgaaaggcatcaaaggcaaccgttgccaggggacgcagcggcggtgcaaagcgctgcaaataacgttcgcgccagtcgtagagatagcggggtggcgtgtgacagtaataaatacgtgtgccgctgagctggtgggtaaccgccaggggcgcatacaagccgctgtagatcaccgtctgagcgtcgcgcagaaagccggtgcgcagcgtgaagcacgccagtgcctcggccactcggggtagtgagcgggtagaagtcgaacccaggcaacgtagcccctctgcgcctagctcctgctctgcagccagataacgcgcttgttcaaaaactcgcgagaccaccagttggtagtcaggcagccccttggccaagtcaatggatagccgctctgctccaccgctgacctgcaaatagtcgtagagaatgtagttgctcatcgcttactcgacccacgaaaacaggggtgccagcctgttgggccaggaggccgattgcgcatagtgctgataacgaggctcctggcctgtttcatacagcgcagcacgcaccgccacaatgaactcgtccgtcgatgaacacagcacggccgggctcttcaggttttccaattctgcccaacggctggaaactaccggcaggccagccgccaggtactcatagagtttgagtggatgaatattcgcaatcagtgaactgcacgcttccaggtgaaaggggatcagtcccacatgggcatgtcgcaggtagctggccatttgttggtgaggccgcacaccaaggaaatgcacgttgatcgacatgttggtcggcgtattggcacaggggccgatcagcacgaaactgacgtccggcatcgcacgggcacaagcctccaccatagccaggtcaacccagctgctgatatcaccaacgaatacggcaatcgggcccgcaagtgcagcgtattcatcgggcagcggcggctccccggcgaagcgctcgcaatcaacgccattgggcaggtacattacctcccgcgcgccatgctctaacgcccactgtgacaagccttgcgaggcggtaaccaccagatcggcgcgcatcattgtgctcatttcgctctgtagagcgccggcaccataaccctcaaagccggcgttgtagtcagccaggcgcatgacgcagcgcttgtagcggatctcatccagccaggcgggctgatagatgctgtccagaaacagcaagtcgacctcgccgaaaccggcatcacgcacaacctgactcacgttgggccaactcagcttgttccagtgtgaaaacaaccagggcgagcgcagaaaacgacgattggagggtgctaacaacgagaacggaacgtagtgccaaagcttgccgtcaaggtcactctgcccgccagcccggtactcctgaagacgcgtctggaataccaatgagtttggacgtagaaagttgatgattgagataggtgcagccacataggcgacttcccagccctgctccacgaactgggtagcgatggcatgactgcccacgcgcatcggcgacgtccagcagtgaatgcctacatgcagaactcgcttaaccatgaagaggctccaacaaacgcatgctccagacacaacgcgcgggtacatcacgaacacggataacttgagtctccaccttgcagccataaccgggtgagtaggcccccttttccaccgcggcctgtccagcggagatctccagcctgacctgcctgccatcagagatcagtaaccagccctgctcatcgcgcagcactcttatctgcggggccagcgggaatgccaactcgcccgcaccggcgccatactcatcgacaacctcgaagccatcgtccaggtacgccacactgcgtcgatgcgtagcggcaaacccgtcatgctcgccgcagaaaccgtcttcggtggcccggatcacgcgggtgcgcgcgactcgtgacaggctgaacaaaccggtaataccctccagccaatcattctgctcgccggatccaacactcaacgtggcatgtgcccgattggagcggaatgcgttgcgctgatccggcagcgccgtatagccataggtacccggatcgagaatgaacggcacaccgtcaaagcagacctcaaacgacaactggtcattatgcgcatggccgccattccccaattgcccgacggagccgcagcgcaacgacaaccagagcctcggacggcgatagacatacagaccgaaattgtcgaacgcacacaacgcatcgagcgcggtctctggctcgccgccctgtccttgcccaagggggcctgccagcgcctgtaagagtagtgcgtccagtgaagccggtggaggtcttggccccttgcgcaactgcgccacgcaatcgataaacaccgcatgtccatccttccagggcgcatcgtgtaacgcatcgggagtgagcttgaagaagcgcccgctatcgttgtcaccaacctgagcgactccgccgtctggtcgggtgatcccacgggaaaaatcagccattctgaccaagtgccgcagggcctcttctgaatgcagcgcgtgagccgcaggcacactgcgctgagccggcagcacgcctgggcccgaggcatccaggccgtcgtcgaggatagcggagttcagagcctgaagccgcgccgccacgcggcgcgccaatatagcgggaaacagcacgagttcagccgacagccggtggtagctggttgaagcttcgaaattgctgccatccgcctggaactgcacgaacatttccttacccaactcattggccgccagcatcaaccacgcatcagtctctgcgctgggcggcaggtaggccgcaacaaacagcaaaccagccaagttggccaggtaatggttgctgcgcaggtgggggaaccattccaggtgggtgactatatgacgaccgtgggccagtacactgcgcttgaattcgatgtcgaagtccggcgcgaaacgcatgccggcggctataaaaatatcgtgggccagcagtaggttggcgatacgaattcccacgtccatggtgcaggaccagttgacaccgaagcggggcgggttgcacgcaatgaaatccagcacctgatcctgaaactctagacgtagacgctcactcgccgcctgatctgcagccaactggtgggccgctgctgccagggccagccgtggcaaatgttgcatacgcgccagctcccagggcagcttgacgtcgacgccaagaatgtggccgtagcgaattagcgccgaaggcgtaaccggcgaccagcggtagcctgaacgcaggtcaaggtgccagtcgatggactggtagccgggcgaaatcaaacgctgcaagcgtgtcgcatggcgacggttggctggattgcttccttggattgccggcatgtcatagcggtgcccttccagtccggccgcacggaatcctgcaacgggctgtatgtcccaagcgccgagcaggtcgaagcggtgctccagtaagcgctcgctgtcggcagtcagtactgcacgccaaggctccagcatttgcgcagtgataggtggcagcagcgcttgcagaggctgctcgggaacatcgccgccaaatgtaggcaaaaaacggtcccgcgcctgcagcctgacttgcgcccagttgcgcagcgcataggcagtgacgcgacgagcaatctgcgcaggcggatggcgcagcagtcggcgaatccgggttggccaactcataaacagatgcgctcaagtgcgcatacgatccgctgcgtatggtgacgccaagtatgtttttccagcacttcctggcgtgcacgctcacccagggagcggccaaagtcaggctgctccaacacgtgagccaagccctcggccaacgcagcagcatggcccggctccactaaccaggcgctgctgccatgctgcagaacctcctggatctgaccgagtgccgatgccacgataggtcgccccatagccatgtattcgaacagttttgtgggtgaaccgaagaatggtgtgccatcaggattgggcacatgaggcgcgaccaataaatcacaacaggccaggtaacgaggtgcgtccttctgcggcacctggccagtaaatacgcattgcgaaagaacgccaagtcgcttgcaggcttccagcgttgcagcatggcgggcacccttccccatcagcaacagacgcagattctcatagtgttgcggctggctcgccagcagcagggaaaaggcctcgaccagttcctcggtgccatgccaaggtccgaaggtgccgataaaaccgatcaccgtcttgccctcaagggccagggtccgacgaaggtccgacgcatcgatgtctggatgaaaagccgtcgcatccacgccattgggattgaccagaattcgctcaacgggcacgccacgcccaatcaggtcctggtgcaggacatcgctgaccaccacgatcagatcggcggcttccaggttgagctgctcaacttgctcggacagtttcaggcgcgccactggcttaccccagtgctggctgatccagacttcggaaccgttgtactctgtcaccagcggtacattcagctccagtgccagcttggcgcctgcatagttgttcaagctatagcgctggtagataaacgaggggcgttcggcacctactaccgcgcttacctcggcgctggcggagcggctgaacaacaacgctggcaactcacggaaatcccagaaagccggggcgggcaaaagaatgcgcacggtgaggcaaggatcgacaataggattacccacggtggcgaacaccaacggcacaacacctgtgacatcgcccaagttgttgaccactccggccatgtgcgtgacagagccacccacttgggtcgagaaccataggtcggttttcaggtacaggcacggagcaccgggtttcggcgatgcggcgctgcgacgctgcgcacagccccgtagatgggccaattcacggttcacttctgcgagctcgcggggcaggcgcagcgcctcgccgagcgtagcgaacgcctgacgcagcagtgcaaggaagcccactttcagctgccgctggtgcgggtcgacgatcatcacactaccgtggctaagcagacgcagaaccaccatcaccagcagcgggcgcgggcgtagcccaagatgcgcaagcgtcagtgtcaccgatgtgtaacgcagtaagtggcggcgcattcccgggccacgcacagtggcagcaaaatcagcgtgtgaccacgtttcgacgtcggcaggcagttgcatgccctctggaggcccgccgtcacagatcagcaagtgccttaccatatcagcgcccaccccgcgcgttcggtgtgtcgatccagcggtcgtaccagcctgccaggttgtacagcacccacagattggtgccgtagtcgccacggccactgcggtgtgcctcgaacaactcgcgaatatagccggggttgaaccagccacgcttgaacagcgcgcactggttgatctcgtactctacacgacgaccgaactcacccttgagccaataggccaccggtgcgccgaagcccactttggtacggtcgatgacgcggtcgggaatcagcccgcgcacggcatccttgaacagtgatttggtgcggccgccttccagcttccagtgagcaggcatggcgtaggcggactccaccatacggtggtcaagaaaagggacgcgtgcctcaatcgaatgcgccatggtcatcttgtctacccgcatcagcagcagctcgggcagtctatagctgagttccagttgggtcatgcgccgcaattgctcgatatccccagctggcagcatggccgctgccgcagccattaccacgttactgtcggccacacgcagcaggctgtcatccagtggtccggaactgccgccaaagtcgatagcactcttgttgagcaaggcgcttttctggatttcccagaaggtcgcagcccccccaaagaagcattctttgtcactactggcacgaatcaggaagtccagcccagaggcgtgggacaaaccatcacgtcctgcttgtctggccaaccagccagccccgtggcgcatggctctggggagcatgcgatagggttgccagaagcgccggtgcaatttcagatatcgcagataaccgctgtaaccggcaaacaattcatcagccccctcacccaccagcacggccttgacctgacccgcagccaacttggagacatgataaagcggcacgcagacccaatcagccaacggctcatcctggtgataaaggatgtcggcccaggagtcttcaaacatgttccgggtcactgatacttcgtggtgctcggcgccaaagtgacgggccatatcacgggcatactcgcgctcgtccatttccggaaatccgtcgtagccgaccgaaaaggaatgcaccttgccgctcgcgtgcgccgccatgccagccagcagcgaactggaatccacgccaccggacagcaaaacacccaccgggacatcagccgccatatgctcgaccacagaggcgtcgaagctcgcacggatgctgcgcaccgcttcatcgcgggtagccggcagtgaagggggattgagcattggatgccagtagcgcttgaactccatgcggccaccgtcgacaagctgcagatagcaacctgctggcagcttctggataccacgaaacatcgtcatgggtgctggcgtgaccatgccactcaggtagtggtacatggcaattggatctatgtcccgtaccacgtcgggcacctgcaggatcgccttgatttcggaggcgaacagcaggcgaccatcgctggcgtgcaggtaaagcggcttgatgccgaccctgtcacgccccagatacaggacgcgctgcaaattatcccaaagtgcgattgcgaacatgcctcgcaggcgctgaagcaacccttcccatccccacgcccggtaaccctgcaccagcacctcggtatccgaatgtgcagtacggaaccgatgacccgcgacttcgagttcatggcgcaacgctacgtggttatagatctcaccattaaaggcaacgaccacggattgctcagcatccgacatcggctgcgtagaggcgtcgtcgagatcgacaatcgacaatcgccggtgccccagacccaggcgccgtgacgcgtcgatccacaagccagccgcgtcaggcccacggtgactcaggctgtcgcgcatgctgatcactaacgcgtcggaaaccgatcccctcccttgcgcaacaaacactccgctgattccgcacatggctcaggttctcgaaaacagcatcagaagcaatcggttcgcccctcgatccaggattcatgccaaagcacggcattgagtaccgtccagagatggaagctgtagccaccgcccgtgcccatctggtgcttgagcatgtctcggaagtagccgttgtcgaagaagccttcgcgtaccagacgcgaacgttcgaatgcggccatgcagcggcgaccgaagtcttcctgcttgaaccacgcctccatgggggcgccgaagccctgttttttgcggtagatcatgtcgtgatcgaggtaaggctccgcggcttttttcagcacatgcttgccgacgccgttacgcagtttgtggtgtggatgcagggtgcgggcgaactcgatgatgtcgtgatccagatacggtgtacgggcctcgatggagtgcgccatggtcagtttatcgacgcgcatcagcagatgctcgggaaggcgcagtttcatttccaggtagggaatcttttgcagaacatccggctgcaacagtttgcccttgatctgcgacatgtagtgttctaccactgcatggctgtcggtgctgcgatgggagtcgggcaaaagaccctcaaccgggcagtcgatctgactggaaaaaatgtccatgtttggcgtgagctgatcgcgcataccgccccaccagcacaccgcgcccccccagaacagttcctgaccagcgcgcgcgcgcttctggatttctttgtcttcagtggtcaccgctggcagaagtgccctgggttgggagacgaatcgtcgccaccaaggcatcccgccgccgggcagcgccgggttatacatgttcatcgctttatcgcgataatggtcgcaccaccagtaacccaagaagttctcgtccgcaccctctcccacctggacgacggtggtgccgttgtcacgcaccagcttcgacaagaagtacaggggaatgcagacgttgtcagcaatgggctcgtcttgcaggcgcaccatctcaggcaggaaatcctgcgcgtcgcggtgattgatcagcatctcgtgatgctcggtacgataacgcgcagccacccgctgggcatacttgaactcgttggtctcctcttcaccttcataaccaatcgagaaggtcttgatcggatcgctgcgcagctcactcataagcgccacgttaaggctggagtccacaccaccggaaagcaggacgccaaagggtacatccgagaccatgcggcgctcgatggactggcgcagcaatgacgtcatctcggccacggcctgttcatccgtacgctcgataatgtccgcagcgctgggtatgcagtcccagtacttgtgcgccttggctttaccgttcgcatcgatagtcatcagatgcccagccggcagcttgaagatgcccttgaacaaggtcagcggtgctggcgtcacgataaaggtcaggtagtgtgagaacgcggtctgatccatctgcggcgatactgcgggatggccgaacaacgcacggatctccgaagcgaacagccactcgcccgaacgggtgcgggtaaagtacagcggtttcttgccggcgcgatcgcgagccagatgcagcacgggcgcattgggattacgcgcgtcatagacggcgaaggcgaacatgccgtgaagtttctgcacacagtcgatgccccacacctcgtaggcacgcaatagcacctcggtatcggagtgatcggtgcgccaaacgaacggccgaatcgcggaaatctcacggcgtaacgcggcatggttatagatctcgccgttgaagctcagcaccaccgtggcatcttcgttcgccatcggctgcgtggcggccgtggacagatcgatgatggacagccggcgatgccccagcacacaacgctcataccgctcccgccagatccctgcgccatctggaccccgatgcagcatgcgatcacgcatattgatcaacgtccggtcatcgcacacttttgactgcgggttgaaagcgcccgtgattccacacattcgattattctcagcgttcgttgtggttgatgtcgtcttgctggcggccaaaaagccttccaagccggcgggacaaccgataagccaggttgcggctgatccgctgcaacctggccaacagaatggcgtgctcatctgctgctgccaccagcctcaggttcagttgctgtgcatggtcagcttgttcggccagcgcggcatcgcgtcggctcacctcttcttccagatgcgccaggccctgacgcagttcgacgatctcgcgttcgcgctcagcggcatgggccatttcctggttgattacctcggccatccgactcaattgctcactgcgtcgcagcaattcctgctgcgactcttgctgcagttcggtagcccgcttttgttgctcttgcgcacgaagcatttcgaggctcagcgcctccgcggcgttgccagcctctgcctggaggcgctgcacgtgctggttcagctcgatcatttgcgcagccgttccggattgcgccatgggttcggcctgggccagcagttcagcacggcgctgttgtgccatggcgcgacgatggggttctaacgcggcaccatcgcctttacgacaagcaacgacaaagagaatcggtgccgtcagcgagaaacgctcgagcaacgaaaccgccgggcctatggagttgagcagtgcgcgcgccgtaaccggcaattgctgcgattcgccacgtccaaccagcaggtcggcagctccacggtgtcggccaagcatgtaggaagcgagctccggcaggctcatcccatattgcccatccatatgcaacaactcgaaaccgcaacgctccagcaggtgacgaacctgcgcagcgccaaagaggttgatatgtcccggcgtgtcgtagccaccatgcaccacgctacaatcaccgcgctgagcacgcagcagtggtgaatcgagattaggaatggtgaaggccagcacgccattatcggccagcaacgggtggcaactcagcagcatctgcgcaggatcgaccatatgctccagtgactcccagaagctgatcagatcgaagacccccgttggcatctgggtatcatgcagtacctgcagcccggcatcttggcagatcttcaggcattcacgcgaagactcaacgcccaagccatcgaagccgtgctcacgggcggcaatcagggagttgcccaggccgcagcccatgtccaggtagcgcagcccttgccgtgggttgaacagcacactcaggcgtgtgaaatagtcattgaagcgagccaagtcggcctgctggttttcggcagacatacgcttgtgaaaggagcgctggaggactttctccgcctgcgggcaagcctggaagaaccgctcgaacaggcgagcatcgaccttcagcgggacgtgccagcagccgcactggccacactcttcatagccataaccatcataggactgaaagatcagccgctgatcgtgctccgtgccacaggccggacagccgcggcgttccaactcgactatcagcgggcggccctcacggttccaccattgcacagcctcgccccagtcggactgactcatagtgctgaagggtgtcccgatggtcatctgcggagcgctggtatcatcgtcctgcagggtggtcaggacaacgatcaggcgggcaaggtcgccagccaagtcaccggcggtctggtcaatcgacattaagtagtccgcctcgtgaaattcattcgccaattgtctccgccacgcccgcgcgcgctgcgtaaatcagcagttcacgctgggtcgggtcagccagcatggcctggtagttttccaggtcggtacccatcagttcagtcaagccatagatgctgtaattgaaggcctgcgactcaagcacgctgaagttggaggcctgcagcatccactcgatctcgtcggcggtatattcgcggtgatgcccctcaaacggcaattcggtggcgaactggctctggatcggggggtggaccgactgcccacgtgccagtttctggcggttgtagatataggccaggttgggcgtgtcgagcaccagcaggccatcggcgacaagcgagcggtgcagatcacgcagcagcaggcgcggagtatgcggcacatgctcgatcacacccatgagtaccacggcgtcatagctgctatccggctggaagtccgcgaagttctgcacccgcacgccttgctcgatcagcaatcgctggttgtcatcgaagcaagcgccgtagctgtcgtacgagtccagcgcggtcacctggtatccagcctgtgccagcatcagcgagcagttgccgaaataggcaccgaagtccagtacccgtgcacctggtggaacgtgctggcgcagcatgcgcaaggcacgaaccatgcggatcgaactgaggttgatgtagttggaccagttaaagcctttcaggcctggggaatgggtttccagaaccgagtaatccttgccgccgatgcaggccatgacctgctgcgcggcatggtcggcaatggcaaactctgttgcgaaatcacgctgtaactcgtcggtaaaattcagcttcatgctttgacctcattgatgatcaggcggcggctctcatgcaccaacacgtccagcccaatccatcgttcatcacgggcgtcgataatgttgcgtgccagccactgcgggttctccgccgcaaggttcgccatctgaatgctcctgctgcagaagtcgaacaaccacaatttcaggatgttggcggccctggctacgctgactcctcgcaggttgaacgcgccgacacacgcatcggtagcagcgtgttggcgccagcgaacttaccgccattacctttgatgttgaattcaacacctcggttcaaagcgaaatagacatcatcattgatagagaagaagcggccatcattgtcctcgaagtaaccggggcgaaccgcgaaaagcgtcagggtaaaggtccccagtcccagcctcaagcgagaacagtcaaaactgacctctccttccccatcggcgatgctgatttcgcccgcgctaaggcgagcgacatcggtaaccccgtcgcggtggatcgcgatgaggaactcaaccggtagcggcccggtacccggctcgacccgatacttggcgcgcacacagatgggctcgccggcatcgaagacgaaccgactgtcaccctccgcgccgcacagttcgactccctcgagccaaatacggcctgaaccatgtacgtcggactgtggagccaactgggacggcggtgcctgcatttcgcttcgactagtcggccatgtggacagctccccgaggagttgggcggcaacaagttccagctcggcgcgcatcgcgcatttatccttgaaccagagctcgcacaacagcgtattgtcttcgctggcggagtagtcgacttcgactctcagcgcgccttcgccagcctgctgaatctgctgctggctcaggtccaacaccaatcggcagcgcttgaccgcaccaccgtccgccaggatacgcagcccgctgcgcccggctaccgactcaaaaccagaggacggctggataagcgtacaaccttcctgcatggggtactcattgagcacctgctcaccatcaagcacacgcaccgtgcgcaccagtagctgcccacgcaagggcgcctggtcggccgtagacaattccagaacacacaggccggcctggcgcgtagccaaggccttggcgcgcaaacgtgcttcttcctggaggcgtaccgagtgttcataggcgcggattacttcatcgctacgcccatccatcaacacgctgccgcggtccatccagatcatgcggttacacaatttggatgccgaatacacatcatgggacaccagcagcaccgtggtgccgctctcctcagtcatttcccggatgcgctcaaagctcttgttggcgaagtaggcatcgcctacgccaagaatctcgtcgagaaccagcagctcaggggaaattgcggtcgaggtggcgaacatcaagcgcgccatcatgccgctggaataggtcttgaccggctgatcgatatattcctcaagctcggagaaggtgatgatttcctcaaccttgtgattggctttatccccagtcacagccaggtgcgccaggtaggccagcgcattctcacgacctgtgaaatcgggatggaaccccgtaccgatctgcaacagggcatgtgctccctggctcacctcgaaaaggcccacagtaggttgcgtcacccccgtgatcagtcgcagcagcgtgctcttgcccgcgccattgcgcccgataaaggccactttttcacccttgcggatggtcaggttgacgtcgcggatagcccagtgctcttgataggctccctcacggcgtagcatcccaatcatgtcgaggaaccggtagtgcggcttcgcataaagcttgtacagcttggacaggccttcggcgtggatgattacatcactcatagtccaccagcatgttcttgaagcgtctgaagaaggcacagcccagggcgaaggtgaccacgcagatcagtgcgtaccagcccaacacctccagattcacaggatgattagccagcagcacggtgcggaaggcctctgtcatgtagtaaaccggattgaggtagatcatggcctggaagccacctggcaccatttccggcttgaagccgatgggcgagataaacatcagcagcagcaaactcaggttgacgaagttagcgacgtcgggcagcgcaaccaccactgccgagaggacgaatacacagcccagcaggaacaaaacctgtagagcgatgaccacgggcagcagcaggaagcgccagctcatgttttcgtcacccagcaccagcaacgccacgatcaggatgctgaccacttggccggtcaacgcgaccagtaccgtgcgcaccgggatcaggtcaaccggcagcatcacgttcttgaccagatgcatattctgccgcagggaaaccgctccgctgttgagcgcctcgctcatgccgatataaggcaccagcccggcaaaaacatagagcgtgtagtcgaactcgctgagccctgggaaacgcattttgaacactaccagatagacgaacaggtagatgctcagcaacaacagagggttgatcaccagccatgccttgccgaaggccgaccccgaatagcgcttcgccagttccacgcgggttacggctgagagcacctggcgataggcccacatcatcgataacacacgccccgccgagcgcccgattcgcagaatcatcgcttgaatccccggaacagaagctccaccacgggttttctcagaacccccaccatccgagcggccaagcgccgcacaggatgacgatctgactgttgattgttactcacatactggacaatgctggcgtccgccagggtccgatcgaagaatggcccctgataaccgtaagccatcgggcagcgctggcagggtggcaacggcgtgtcagagttcaccgtgcggcggaattcacgcattttctcgccgttccaaatcgactggaaatcctgctcgaagatattgcccagcgcgtaatgctcctggctcggcccggtggtgatgcagcacacatccatgcggccatcgacggtgaagttgttgatatcggtccacggcttctggcagtagaaacgtaccttttccgggacttgcttgaccttgatgagcttggctttagtcggcgtgaccgtctgagcggaggtcgcctgcggctctccggcgacggcttccatctcgatcagttccgtgccttcacgctcgcgatccggggtatcttccagagcatcgccccaatcaatacgagccttcatcccctcatcgccgcgggagaacagcaccacctgcaaacgatggttttcagcggtatcgatgatcaagtcctgcgcatggctgccgggaccgaagctgaactggtgcgtccacttctggaagtcctcgctgagtacaccgatggccaacttacctgtttcgacgtcaacctttaccgggaagaccaagcggctgccgggtgcgcaagggttggagtaggacttgatcagatagcgtccattgaggttcggtcccgccacgatatccagtaaatgaccttgccaacgggcccgcacaccggggctatcgatctgccagcggcgcggaaacggcaacttgaacgccttgcggataccgaccccgggacgcatgacgcgaatgaagtcgatgtcggctacaaagcccgccgcaccggagaacaccaaggaaacctggagttcttcatccgtctcgaaggtcagagcaacctcctgttcatcctcgccggcctggatcacctggctggtcagaacatgtccagaacccgtgagcaccgagactaaaagaggggtgccctcaagtttcacgctagcccggaacagcagttgctgaccaggctccacgggtatgagcgcgctgcgccacgtgtagtcgccctcgccgccctcggggcagcgcaacaccgcacggttgagattccaggagacactcatggccgaatcgccgatatgccaatcatctcgacgcggtgccagcaggcgcccctcaaaaccggggggcatgatcaccctgtccacggggtcaggccggaccgagcggaaggtggccgggtcaatgcggatgtcgcaggagttgcgcgtgtagggaatctggcgccgcggcacgtcttccaggtattcccgtgcggcatcaagtgcatcgttgacctgggattcatacggcacgatgtcgcgcaggtcttctactgctcccaggtctgccccgagctcagacaatggccgaatcatgatgacgttgacgcgcagatcgtattcggcgaattgcaggaactgctgcagttcgtgaacgttggtggcatgcaccacgaacgacacgaacaaactgggggtgtcgctccaggcacgctggtcgacaatggcgcgaatactgttggtgacgcgatcgaactccttgatcttcatcacttcgcggtgggtctgggcggtagctgcattgagcgagaaggtgattgactgcaagctcagcagatgggggatctgctccggctcgatcaaagcgccgttagtgatcaggtacgacgaagcacctttcttctgcagcgtgaccaacagggagttgaactctcggtacagggtcggctccccgttgccttccacgccatacatgtaggcggtattgagtgtcggcgcgataaagcgctggaccttatcgaatggcaactgcttcttgatgatgccggtgcgtttaatcgtcaccgaacagaactcgcagagggcgttgcattgcccggtcgggcatagcgcaaggtacatcggcaggctaagactctcttcgcgccccagacgcatctccatgccggccacaaaggcattgaacaaccgagagctcttacagcgtcggtggacaaagcgcttgagaggtccccagtgcggcaggtaggtatcgacgtcgagaatactgtcgtcggccacatagggcgccgccaggatttcgaggccacccagcgtgaatgtgctgcctcggggataagcaccgaagtaattgaccagtgccaggcgataactgtcctgggcagcgggtgcataggaaaatgccagacgatgttcacccgtctgttccactgcccgttggcgcagccagtggtcaggatcaccggcactgccctggttctcagacttgatcaacaccagagccaagggagcggcatgatcgacatcgacctgcagttcaaaggtgtagagctgtcctttatgcaactgaaactcggaggacagcaactgggtattgagcggaccttcgtcgcagacccagtagccttctccctgagcctccaaaggctgcgcacaaaggttttgccaggagacatccggggcgatctggggttcgataaatcccgtacgcttcttgcgcccggattcacgcccaacattttcggtcacttcgacgagaggaatagtcttcatacatagagtccttcaggctcagcgttccatagcgcatttgcgctttcgcgagcatgtacagaggaagggccgcttggcgcggtaccgacgaatatcgcgcggcacaaagtggatgactgcgccacaatggctacggtgcgcaaacgcaccccatagccacttgaataccaagcctcttcaacgctccagatcagtgaggggggtgcctcgaatacggcaccgccatcggcgtaactcagtaccgcccggttggcctccaccgtaacctgcacactggggtgaaccaggaaatgccagcgcaatagatggttttgcgcattgcccagacgatcctcgacgatcaacgcaccgctgtcggccaggcagacccggcgctcatgcaagagctccggggccaggcgctggtaggacgaatgacgcccgatgataccgatgctgccgtgaccttgtttgggcatatcccactcaggttcgccttgctgcacgaggcgaaacaatgctttgggatccatcccgtgctgttcctggccatccacttgtaccgtgttgtgatgggcggtggagcggaaccagtttcgtgcgtccgggtcctgggtataggtgtaactgcctccatcgacgaacagcggctgatcgccgatggcccattcgatggcgagctggtcgttatgtttgtggttaccgatgccgaaggtaccacacaccgagttgctcattgcgacatagtgaccggcctgacgcagcactgcaacgccggcctgctcgaacaacattaccggtgtgggagccggcagttccgtgattgccgtcgccggatcccaagggtcgcgccagaacagcgcctcggcctgcccggctgcgtccagaggtttatcggatgtccgacagccaagcacaaccgagcctgcggccagcaagtggtccatatgctcctgctcggcttcccaacggtcgtaggccgagaagatatgcgcgcggccattatcagcgtcaccgatctgcggcagccggccgctgtcctggcgcaaggcactgacgaaatgcagcgctttgaccaagcgctcgcgatactcgcaagagaacggctgcctgtgatgctgggacagagcataggccgacaagaacatctcggtcacaaggcgatggtagggcacgctcgactcaaagccgccaccgtcttccagcaattgcagacgcacctgctgctcaagccccgcctccgcgataccacgccacacgcagccggcatccagcccggggaagttcatggccaaccagtacaggccgaacaggttcgccaggccatggttggaaacgatgatgcgcccttccagggtgccgaactccaggttggccgtgatatgccggccgtgttgcaccaggcttttgaggaagtgtctccaccagcgccggtctagctcgcctgagttctggaaaaaggacaggcccgcttgccaactgaccaaacgcagggccacgtccatcgggcaggcccaatgaacgccgagacccggtttgttgcgcgcgataaagtctgcaatcgtgcgggcgtaacagcgtgcgtatttttcatcaccggtcagccagtacgcctggcccagtgccggaaaatgctggcaccgcgtaagctcccaaggcccctttacatcagccgtgccacggcgcatgacgaaaggcgaccagcgccattggctgaataccgcgccatagcgttcgccggaaatagggtcgcgattccaatcgatatggtgccctgctccgcgcttaccccggcgcatgtccactgtcccgctgcccagcaagtcgaactcgccgcgtaccagccggtcagcctgggcaacgatgcgctcggcctcaccgggtatagcccggagttgctgcaccaccgaatcacggtcggacggcaggaagttacgcctgccgaaatcaccgcgacgctgacgaataaggtaagcgtagaaaccctgccagccatttcggcgcagtattgcggtcatctcgccgtccgcaggttggcgtgagaacaggtaacgcccccactcccagcagcgctcttgaatagattcaagcccgtgcaaccaggctttcaaacgctcacggtggggtgcagcgaccaagcgcaggcgatgcaaaagcgtgcgacgggcgaaacgaattcctctgccgatcacgatgtcaccttcagtgcggccgaacgctgcacagcgtggtgcaggattttgtgtacatgcttcttccaggtgtaattgtcgagcagagcctgacgcgcattggcccccagtgtcgaccacaagtccgggcgagcagccaggccggccacggcattgacgaagtcttcggtgtcacccggcttgcacagtatcgcgcgctggccgtcgagctggtcgaggcgggcctctgccaggtcctgggtgtcgaacgacggggtaagcacatcgccgatctgctccagcctactggctacaatagccccgccgagcgccatgtactcgaacaacttagtgggcgagccgaagaacttgctgtcaaccatgtggcggttgtgcggcgagatcaggatatcgctacaggacagcagcctggcagcgtcggtctgcgcaactgtacccggcataaagactcgatcctggaggtggtgacgcttgatggcatcgtccaccagatgacgaaagtttccgtcaccgataagcaggaaacgcaggttcgggtcgcgctcacacaataggggcagtgcctcggccagaacatcgattccgtgccagccgccgaaggtgccgataaaaccgaccacgcagttatcgggttcccaaccgaggcccacgcgcatctcgtgcttgagcgggctgtcgatgggcgcgtagtgatcgggcgagcagccattggggttgaagaggatcttctctggcgggatgccttgctggatcaagccatccttgatcacctgcgaaatggccacgatggtcgtggcctgggcgaaagccgcctgctcggccttggcgaaggtcgtttccaactcataaccacgctcatcgaagctgcgcttcatggagatttcagagccgttgtactcgaggatgtagggaatccccagttcacggctcagtcgcgcgcctacgtagctgcccaggatggaccgctcgtagatgtaggccggtttcagttcggccattcggtcacgcagccatcggtagaaaaagcgcgaggccttcagtacgtcgatctcgttacaggtcgaggacggcgtatccattatcacctgctcgatgcccatcgtatcgagcaggtcgaaacggttggccataaagcacactaggttctcagtacattcggccaactcctgagccacatagcaggtgtgtccgtagctaccaccggcggtaatattgacccagtagtcggtgcgcaggtacacaccggtgccggggatcttgttgtctgcgctgggtacaccgctgacggccagtggataaggcgaggcctcggcgatctgccgttcgatctcagcactgatggacgactccgagtcgcccagcagacgcgccaggtccgcaggcatccactcgaccaaaacggcgctcacatccagcgatgaggggccgccctgagcattactgaacaccagggtcaaactctcggagccacctgggtcgatcacaaagcgctcggtgaagtgccctttggaaagggggtagttgccaagccaggtggactcgtcggcattcaggcagccgaccgccatggcaccggtcgtcagctcaccggaaatcgataacaccgccatctgacctggccgagccgcaatcaccctcgaacgcagttgataaccccagtcggaatcatcgctttccagatggaagccttcctctcgcagggtaaaggcacgggcagccagcgcgctccatccgaactgttgcaagcgctctatgcgggccacgcgcacggcgtgcagagcacgagaggcataacgccgcaggacgcgagccacacgtagcggcaactgtatgattggcagattgcgcacgactattattctcccgaaaacgccattttgtgagtcttgaataccttgaccagcgcttcccgcgtcatcggattggcaccgataaaccagatcacgccttttttaaacaaatccagccacatatcccagccccagtcttgctgcctgagcatcaagcgtacctggccgaccctgcagcacagttgccgcccgcccacaggctcgcagtacccgctcgcgtaatctctggagacaggcccatggccggaatctcctgcctgatgcgcgtcatcatctgcgtatcggcggtgcactgcggacaggacgtcaggcttatctcttcaatctggtaggcgtagggttgatcggcatagatgagtaattcgacgcgggagccggccgcaaccgtgatggataaggtgccatcgggcatgcggaagtaggtaggcacaccagtgtcgatggtcaaccgcccgctcacgggctgtttcccttgctggcgccccaccattcgcagtttttggggcccctgctgcgtggcatcgaccaccagccctagccccgcggggttgagattgccgctgatctgcagcattccacgatgcagcgtaaggccgggtgcctggtaaggctgcacaatcaaaccattgtcggggccgaagaactggtcgagggcaacctgcccatgctcatcaaacagggttgagcgcgtcactgccagcgttgccaggccgaccacagccaaggcaataatgcccggcagcagcggacgcagcggacgcagcggacgcaagtcaatagcgggcagtcgtggcatgcgccaagggccttcgagtactcccaagcgcgagcgcagacccagacacggcgactcgacccatgcccaggaggccgcggccaggataaaggcgaacagcaacgacgcccacgccatccacgcttcaccggtgataccagcactgtaaagcgccagcggcaacggcatatggaacagatagagaccgtaagacaggtcacgtccacgcatccatgtcgacaactgcggccaagagtgagcaaacgccagcacaaacccagccagcagcatggcacgcagcgcaatcactggatcaggaactcggtagtcgagcgtagtagcgccggttttcacgtagtaagcaaggttgatcgaagcaaacaccagcatccaccaagacgcgcgcccaacgaaaaaaaaccgcagccgctgccaatagttcgccaccgtggccccggccaggaacatccagaagtaaggtgctgggtttgaaaggagcatgccggtcaggttggaactgggatcgctgcgcagcattgggccaaacttcatagcggccgctaaggataaggcgaagcacagcacgataagcaaaggcgtcaaccgcaaacgcgccagagtcttggagaaaaccagcggcaccagtagatagaagcccaactcaaccggaattgtccacagcacatcgctggggtagccgttgtacaggccgtcccaggtaaaggggccgtagttggtgaccaggttggcccagaagttggagcctaaaaacatcgccgacagcagccacttccagaacatcggatccaccagcgtcgccagggcaaagccgccggtgcaggccatcagcacgatcaccaacagatactgcaaccacagcgctgggtaaatacgcagggcacgactaccgaaataggtcaacagcccgcgctgccgattgacataggagcgcgtgatcagaaatccgcttaccacgaagaataccggcactcccggaaagcacttgagcaacccctccacctcacgcggcaacggcacctgcagccaccaaaagatgtgtgaaaatgccacctgcaaggccgcgagtaagcggatcagatcgaagttattgcgctgctccttagcgtccatgcctgtcagtcgtccacctgaacgaccgcgagaccagtgagcagctcctcgacccgtagcgccacggcagtggtctcgacgatctcgtcgaagggaatcggagccgggcccccgcttgccagcgcttgcgccagcagcttcatctgcgtggcctggcctttatcggcctcggtagcagaccagagcacctcgccggtgctggccttgatcagttgcttgaagtcgtcaacgacataagcctcgccatcacagaacacttcgatacgctccttgggcagtccctgcttgggaccgagcgccgtatagaacagattacccatgctgccgtcggcatagccgatcgtggcgctgaagttgtcagaggccagataaggcagcccgcccgggttgatgccagtggcactgatcgacgtgacgggcgcaccggacagcgaacggaacacatcgtacatatggcaggcttcgccaatattacgtccgccaccctgctcagtctggatccagtggtccagcggaatatagccaccgttaaggcggtagttgatcgccaagggggccgtgcgcccggaaagagcttcacgcagggcctggagggctggcgaaaagcgacggttgaaacccaccataagcaacggtggatcgaccagggcgtcatggcactgcgtcagttcgtcaagttcgtcccaggtgatcgcaatcggtttctcgacgaacacatgtttgcccgccttgagccctgcaatggcctgagccgcatgttcgcaatggcgcgtggcgatcaccagcatatggacatcaggatcgtcgatggcagcgctcagattggaggagaagacgccgagccggcgttcgcgtacgaagttgccaccacgcaccgcatcgcggctgaccacaccgcgtagaaaaatattgtccagacggtcgagcatgggcaccaacatcgactggccatacgcgccagcgcctaccaacaggtagttgatcttgcccacctgcgggctgcgggcaccgcgcagttggatacgctcggcctcggcaggttccaccatggcaacatccgcccgggtgtaatcgagcagcacgccaataggcggttctagactgtttgccaaggtcttgtagagcgccggagcgtcacccaccggcgctacgatatccacaagcgattccacatccaggcgcctggctgcgatcagctccatgtagctctgcatattacgattgagcgtccagcgcacataagaaatagggtaatcgttgcccttttcctcataattcgcgtcataccgcccaggtccgtaggacgtgctcatcagcaggtcgatttccttgcgatagaaatgcgcacgctgcacgttgaggccaacatcaccgacgatgaccaccacaccgcgtcggcgagtgatctccatagcggtattgatcacgctgtcggacttggtcgccgcagtgatcaaggtgcggtcacaacccagcccggcagtgatgtcgcgaaccagacgagggaactccgcggcattcgaagtaccgtgctccatgcccagcccatgggcacgttgcacacgcttggggtcgagatcgaatccaatcacctgacaacccgcagcgcgcagcaattgcacggtcagcagaccgagcagacccagtccgaccaccgcgattttttcacccagatcaggctgggcgcgacgtacaccctgcattgcaatcgtgccgatggtggcagacgcagcccagcgcatatcgcagccatccggaaccaggcaaaccaaattgcgcggtaccaacacataatcggcatggttggcacgcccggcaccaccacaagcgacacggtcgccgaccttcagtccctgcacaccagcgccaagcgccaccacgacccccgccgccgagtagcccaggttccagccggtttcatccatttcattgtgcggatcaccccctgggttaggcgctaccaacactacatgcagccgttcgaaatcagccttggtaacgccgccttgggcattggagatcaccagcttagcggcctcctcgccctgtgggtcgaagatcaatcgatcatccagcgcgccgggcgtcagggtgcggttccccagccatttgttgccactctcgtcgaggataccaatggcaagcttgccgctgtcgatggaaccgcgaagctccactgcaacctgatagcccacaggaatccgaaagactgcggtgtgtgcctggtactgccagtcagaatcatccgtcaccagcgacaagcgcgcattgtcgataacaaactcgctggcagcatcacgctgccaagccaacgcacccaactcttgatccggaagacgcagcttgggcgactctgggatcagccgggcaatctgattcttggcgatacgtttgagccttgaggcagccaggcgagggtccgcgatggctttgaccagataacgaccagcacggctggtgatctcccgagcctgatccaggcctgtcgacgcctcgcttgaggctgccggacgcaggccggccacttcagtgcccacgctaatcattgaatactggacctgaaccaggaccgcgccgggctcaacgccaggtgcaggcatccgtgcaatgcgtacgcgatcacttgccaaaaggacttgcctcataactctctcttatcctgagcacctgcatgaacatattcactgataccgacactgcccaaggctattcatgccaagaccttcatatcagcatcaggactgcagttgcttttctatcgtcaaagcaagccgcgttgtcgcaagctggctcatgatgtttttttcgtccagcgccccggtattaatggcatccaccagcgccaagagctcttcatgctgacctttttgcggcgcaactgatgcccaatgctttgaactgtcgcccgccacggtgaccgcccggtaatcatccaggctcaaaaccttcccatccgtgtagatatccatgcgctctttcggatggctgggtgaacccagagaagtatataaaagggtggccacggacccgtcgctgtagcgaatggtcgcgctgaagttttcgttgcgtcgaatgccgccggcgctgccgccaatagcagtggcctctaccattaccggctcggcatctgtcagaaaggcaaacaggtcatagatatggcaggcctcaccgatgtttcgtcctcccccttcaggcccatgcacccaatgatccggcggcaggtaaccggcattcatccggtaggaaatcatcagcggcgcgacacgttctttcagcatcgctttaatacaggcaataccgggggcgtaacgacgattaaaacccgtcatcagcaacggctttggcccgacattggtaccgctgtagaacgcttcaacggcatccaactcttcttcatgcagcgccaagggtttctcaaccagcacgtgcttgccagcttccagcgcctccttgaccagcgctgcatgcagatgatgacgcgtggcaatcaacacgaggtccacatccgggtcggccagagcctcacggtaatcggtgccgacaaagctggcaccaaactgcatggccgcggcctttgcgctactaccagtgcggctgaccacccagcgtatctcataacgctcgcgcaatttgatcagattgggcagatgcacgccctgggcaaacccaccggcaccaatcacggcaacccgtaccatgccctggttagcgacgggcgggcgcagcatcaggctccgggtctgctccaaatgcccgtcattcgggtaacgcaacagggccaacagcggccgatcatttccttgaaccaggcgcacgtacagcgcctcggcgtccgccagatcgaccacctcaggaagcaacgcctgtaagtccaccgcgccctgtgccagcagctcaagaaaggccgccatattgcggttttccgtccagcgcacgtaggcctgcggatagtcctgaccaccttcttcgtagtgagggtcgtagcgccccggtccgtaggaggttgaaataaagaaatcgagttccttgcggtagaagtcttcgcgcttgatatccagtccgacatcgcccaccagcacaacacggcctttcttgcggcaagcacgcatggctaagctgatcagctcactactggcggaggccgccgtaacgaccaccgcgtccgcgccgaggccttcggtcatccaggtcacccgggcgacctgatcgtcctgagtgggattgatgcccagatccataccgcactgtctcgcaatatccagacggcgcacgtccggatcaaccccgataacacggcagccattggccttgaacagctgcaccgccagttgcccgagcacacccaatccaaccacgacgatagtctcaccgagcgtcggtgctgttctgcgcacaccttgcatggcaatagcgcctagagtcaccgtggcggcttgttggggagccagtccctgcggcaccagcacggccagattgaccgggacgttgatgatttctgcgtgattagcaataccagcaccggcgcaggcaacccgatcgccgaccttgaagccgtcgacctgctcgcccaccgcaaccaccaccccggcggccgaatagcccgtcggctgccccgccgccaaagtgccgcgtatctgcgcaacggtgcgcgaaagcccctgctcgcggaccatatcgaaggcacgcttgattttttcaggatgcttcaaagcgcgcttatacagcggctctgcggccgacaccacgctggcggcttctgtccccacacttacgcaggagaactctacgcgcacaagaatgtgccggctcccaaccaagggagcaggaacctcttccagtcgtgcagcaccctgccttagcagcagttgcttcaacgccaagctccccgggtatcgattatcaccttgccttcaagcaacgtgcgatcaatggtcaggaactgcttgtggttgaccagcagcagaacgatgtctgcatcagcgatggcatcttcggcctgcataaactcgacgttgcggtacttgctcagcgccgccggcaacgactcgacatggggttcgacaacgcagataaggccatcgatctcatgggccagatgggcagcaatttccaacgcagggctttctcgcaggtcatcaatgtccggtttgaaagacaacccgaggcaggcgaccttgggattgaccaagtccttggcagccgccttgacttgctctatcacccagcgcggcttgccgtcgttgaccaagcgcgccgtacggataagctttgcaaggtctggcgtctgctcgacgataaaccaggggtccaccgcaatgcagtgcccgcctacaccggggccaggctggagaatgttaacccgtggatggcagttggctaattcgatcagttcccacacatcgatgcgctgccgatcacaaatcaacgacagttcgttggcaaaggcgatattgacgtcacgaaaggcattttcagtcagcttaaccatttcagcggtgcgtgcactggtggtcaggcaattgccttcgacgaagatccggtaaaaggcggcagcctgctccgcgcacttgggcgtcatgccgccgatgatgcggtcattgctcaccagctcatgaatgatccgacccggcagaacgcgctcggggcagtaggcgaggcggatatccgacttctcactcgcatcgcagggaaaactcaggtccggccgcctagcccgcagccactgctctagcttctcggtcgtacccactggcgacgtggactccagaatcaccaaatcgccttttttcaggactggcgcgatatttttcgcggccgcttcgatatagctgaggtcggcctggtaatcatccttgaacggtgtaggcaccgccaccataaatatgtcggcagattccggttgcagcgaggcgcggaagcgtcccgacgccaccgcaccggaaagcagcacatccagttctgcctcaacgatatgaatcttgcccgagttcaatgtcgccacaacggacggattgacatcgacgcccagaacctcacatccacgactggcaataagggccgccgttggcaacccgatgtaccccagtcctatcattgacacacgcttgtattggatcatcccaatattccctgcacgatccgcttggcggccaagccgtccccataagggtttccggcattagccatggtttggtactcagtttcgctatcgagcaggcgcaacgtctcgaatacgatttttccggtatccgtgccaaccagccggacagccccgacatccagcccctcagggcgctcagtggtgtcgcgcatcagcagcaccggcttgccgagcgagggtgcctcctcctggatgccgcccgagtcagtgagaatcaggtggcagcgcttcatcagatagacaaagggcaggtagtccagtggcgcaattagatgtacacgtgggcagtcgccgaggatacggccgaccggctcttgcacattcgggttaaggtgtactggatagaccacttccacatcattctggccagccagctcgcgcagtgctaagcaaatgttctcgaacccttggccgaagctttcgcggcgatggccggtgaccaggatcaacttgcgaccagcgtcgagaaaactgaattgctcctcgaactgcttggtcagagcatcgtccatctcaatgcgctgcacgacgtcgagcaaggcgtcgactacagtattaccggtgacgcatatgctggtatcggcaatgccttcgcgcagaaggttagctcgcgccgcctcggtgggggcgaaatgatgtatggcaattgtgctggtcaaacgccggttgatttcctcgggccacggagaatatatgtttcccgtacgcaggcccgcctctacatgacccactgggacacgctggtaataagctgccagactgacggcaaaggtagtggcggtatcaccatgcaccaaaacaagatcaggcttctcagcttcgagtaccggcccgatgccatgcatgattcgcgtggtgatatcggtcaagctctgccctggacgcatgatgtcgaggtcgtgatctggcactataccgaacacacccaatacttgatccagcatctctcgttgctgggcagtgacgcacacgcgacagtcgatcaaggcctcttcctgaagccgctttacgacaggagccattttgatggcttctggtcgtgtgccaaaaacacacagtatcttcatccccccaaaatccttctgaagtttgaaaaagcggtggatatcccgcccatttgcgttatttcttctaacccgtatgacgggagaagcggactcaactacagataagcatattactgaatagtcgcgtcttttctatgaaaaatatcaaaatacttaaaaacttcatgaaacacccctctcacacgagccgaacggttaagccccgatgaaaaaatgtcccacgccgatgcctagcatgcccgcgaacgttagcagacctgcctcgtacacatccgatcgacttgggccagttcactatctgaatagctttgagcacccgaaaattggagatggtcgtccagcgtacctgttgatgcccatgttgcgggttcaactgatgcagaactgtttcggttgcagcgagccaacgatggaaaaagcagtcaaagaaaccaccactctatactagaagagttgtccgggctgcacttggatcgtattccagacggaacgatcattcccattttccggcgcttgttggaaacacacaagttttagagcggacctgacaattaatcaatggccatctggacgaccgaagctttctgctttaccaaggcacgacggttaatgtaataatcattaattcaattaattcaattaattcaaaaaaacaagaaaaagaacacactccccagcaatacaaccttactgtaggatacgctttatttgtatttttatagaaacttaaccattgaaaaatacttttaaaaacagattaaaacataaactattgacgattgtataaatcctcaaatcgaacgatatcatcttcacccaaataagagccagattgcacttcaatgatttcaagaggaatgacaccagggttttccagcgtatgagtttgccctactggaatataagttgattgattctccgtcaccaagtaggttttatcaccattagtgactttcgccgtaccactgaccacgacccaatgctcagctcgatgatgatgcatttgcaatgacagttttgcgccagaattaacagtaattctttttacttgataacgtctgccgctatgaatcgaatcgtagaccccccaagggcgacagacttctctattatcaacagattcgccacggccatcgtcttttagtttatcgacgattttccttacattctgcacctgacttttatgcgcaaccagaactgcatctttagtttccacaattaccaggtcgtttacccctaacgtgctgaccaaacggctttgtgagtagacaaatgtattatttgtctgctcaatcaaaacatcgccatgacaaacatttcccagaatatctttatctccaatctcccatagcgacgcccaagacccgatgtcgctccatcctgcgtcaagagtaactacaactgcatcaacggttttctccataatcgcacaatcgatagactctgcagagcaacttgcaaaagcttcacgtccaacacgagtaaaatgcatatcctgctcactgtctgcgagtgcgctacggcaagatgccaagatatctgggcgaaatttctccaactcttccagataacggcttgcacggaacataaatataccgctattccatagataattaccgctcgcaaaataggaacatgcagtttcttcatccggcttttctacaaatcgggccacgttgaaggtgtccacactcagactatcacccctctcgatgtatccgtagcctgtttctgcctgcgtcggaacaactccaaaagtaacgagttttccatcaagtgccaatggcaatgcctttcgtatagccgaatggaacgcagcagtattttttatcaggtggtccgcggccagaatgagcaataccggctcctgctcttcacgagaggcctgcagagcagccaaggccactgcgggagctgtgttgcggcccactggctcaagcaaaatattggtatttcccaacccgagacgcctaagttgctccgcggcgagaaagcgatgctcttcgttgcagataaggcgcggtgatgctaagtcaagaccatccagacgcttgatagtcgcctgtagcatggataactctccatcggccaggcaaagaaactgcttaggattgagctgacgagaaagcggccaaaggcgagagccagaacctccagccataattacaggtattaacatttaatcgtcccttgaattcaatgcgttttcgaactggctaaaggctatatagcgataccaccttttttgccaccgactcataattttagaaacttccttcattcacctgcccactcatatcagaacagtaacccgcagaaagctttctgtgcagcttgcccatagcctctttcaaagagtccgtatcaatacgaaaaagtagattacctagtctccgcagacctgagcataaaccggatcctggcagattattggacaccacgaatactaccttcataaacgaaagccccatccggccaagcagtcagagcacagcaacacaggttcgcattgttagcctgaagtgcacgccgccgtcaattttggcgagcggctgcgcatcgatatctcgatgcccgatccgccgcaggcgttttggtagacatatagtggccgttcaacttggccgattggatccaactcttcagagccgccgcactttgaatcgcccggatcctctaggcagcttgcaagctcattcagcgagatcgcaagccaaaatcgaacatatgatggaagcaatgaaaaagaaaaggcccctgaaatcaggggccttaggcagtcagtgtgtcaaactctattgcctgaaaccacgtcgagcctccaggatacggcgcattactccaccgtcaccgacttcgccaggttacgcggctggtccacatcggtgcctttaagcacggccacgtagtacgacagcaattgaagcgggatggtgtagagaatcggcgacagggtgtcgtggatatgcggcatgttgatgacatgggtgccttcaccgttggtcatgccggctttttcgtcggcgaacaccaccagttggccgccacgggcgcggacttcctgcaggttggacttgagcttctccagcagttcgttgttcggcgccacggtgaccacgggcatgtcgtcatccaccagggccaatgggccgtgtttgagttcgccggccgggtaggcttcggcgtggatgtacgagatttccttgagcttgagcgagccctccatcgccaccgggtattgcgcaccacggccgaggaacagggtgtggttcttgtcggcgaacagttcggcgactttttccacggtgctgtccatggccagggcttcgcccaggcgggtcggcagacggcgcagttcttcgaccagggtggcttcgacgccttcggcgagggtgccgcgaacctggccaagggacagggtcagcaacagcaggccaaccagctgggtggtgaaggctttggtggacgccacgccgatttcgcgaccggcctgggtcagcagggtcaggtcggactcacgcaccagcgaactgatgctgacgttgcagatggccaggctggcgaggaagcccagttctttggcgttgcgcagcgcggccagggtgtcggcggtttcaccggactgggagatagtcacgaacagtgtgtcgggctgcaccaccactttgcgatagcggaactcgctggcgacttccacctgacaggggatgccagccagttcttcgagccagtaacgtgcaaccatgccggcgtggtagctggtgccgcaggcgacgatctgcacgttgcgcactttggcgaacaattcggcagcttgtgggccgaaggcgttgaccagcacctggttctggctcaggcgaccttcgagggtacgctgcaccacggaaggctgttcgtggatttccttgagcatgaagtggcggtattcacccttgtcggcggcttcggcaccgtcgcggtattgcacggcttcgcgctcgacggattgaccgttgacgtcccagatctgcacgctttcacggcggatgtcagcaatatcgccttcttccaggtacatgaagcggtcggtgacctggcgcagggccagttggtcggaggcgaggaagttctcgcccaggcccaggccgatcaccaacgggctgccactgcgggcggcaaccacgcggtcgggctggctggcgctgaccacggccaggccataggcgccgtgcagttccttgaccgtggctttgagcgcaacagtcaggtcgcccaggtctttgagcttgtggttgagcaggtgggcgatgacttcggtgtcggtgtccgaggtaaatacgtagcccaggcccttgagttgttcgcgcaatacttcgtggttttcgatgatgccgttgtgcaccaccgcgagatcgccggagaagtgtgggtgggcgttgcgctcgcacggcgcaccgtgggtggcccaacgggtgtgggcaatccctaagcgccctaccagcggctcgccggcaagggcctgctccaactcgctgaccttacccgggcggcgcatgcgctcaagcttgccggcgttagtgaaaacggccacaccggcgctgtcgtagccccggtattccaggcgcttgaggccttcaagcaggatgggggtgatgttgcgttcagcgactgcgcctacgatgccacacatggtgtttctcctagatgattgccgcgcatatcagcgtaatgccgcgggcttggatctggtcgcgggcctcgagcggcaggcgatcatcggtgataagggtatggacgctgctccagggcagttccaggttgggaatcttgcggccgatcttgtcggattcgaccatcaccaccacttcccgggcgacctcggccatgacgcggctcagccccagcagttcgttgaaagtggtggtgccgcgctccaggtcgatgccatcggcaccaatgaagagctggtcgaaatcgtaggagcgcagcacttgctcggcgacctggccctggaacgagtccgaatgcgggtcccaggtgccgccggtcatcagcagcaccggctcgtgttccagttcgctcaaggcgctggccacatgcagggaattggtcatcaccaccagcccgggctggtggcccagttcgggaatcatcgcggcagtggtgctgccgctgtcgatgatgatgcgggcgtgctcgcgcaggcgcatcacggcggcacgggcgatggcgcgcttgtacaccgagacgggttgagtggcgtcgcccaccagttcctggggcatggtgatggcgccaccgtagcgacgcagcagcaggccgttgctctccagggcagccaggtctttacggatcgtaacttccgacgtttcgaaacgcttggccaactcgtccacgctgacttcgccctgttcattgagcaaggtcaggatgttgtggcgccgttggggtgtatttcgtttcgacatggtgatggtaagtttcgtttcgaaagataacgaaggcaatcaaaacctattggcgaaagatcgtcaagcgggacgcagcaaatttttatgcgacacagagcaagtgtgggagggggcttccccccgattgaggtctatcagctacaaagatgttggctaatagtctgcaatcgggggcaagccccctcccacattgaataccttccgctgaggaggctgtggataactcaggtctttttgattttgaccggacgtttccaaccgtcgatgttgcgctggcgggcacgggcgacagccagttgagacttatccacatcctggttgatggttgagccggctgcagtgctggcgccatcgtcgagggtaaccggggccaccaacgaattattcgaaccgataaacacgtccgccccaatggtggtctggtgcttgttggcgccatcgtagttacacgtgatggtgccggcgccgatgttggtgcgcgcacctacggtggcgtcacccaagtaggtcaggtggccgactttggcttcggcgtccaacttggcatttttcagttcaacaaagttacccacatgagccttggctcccagcacgctacccggacgcaaccgcgcaaacgggcccgcatcactgccctcgcccatcacggcaccatcgatatggctgttggccttgatcaccacgcccttgcgcaaggtgctgtccttgatcacgcagttcgggccgatcaccacgtcatcttcgatgaccacacggccttcgaggatcacgttgatgtcgatcagcacgtcgcggcccacgatgacctcaccgcgtacatcgaagcgtgccgggtcgcgcagggtcacgccctgggccatcaggcggcggccttcgcgcagttggtaatgacgttcaagctctgcaagctgcttgcggtcgtttgcaccctgcacttccatcgggtcgtggggttgctcggtggcgaccagcaggccatcactcacagccatctcaatgacgtcagtgaggtagtactcgccctgggcgttgttgttggacagacgactcatccagtcggcgagcttattggcagggaccgcgagaatgccggtattgccttcggtaatggcgcgctgggcttcgctggcatccttgtgctcaacaatggccgcgaccttgccatcggcgttgcgcacaatgcgcccgtagccggtggggtcgtccagctcaacggtcagcaggcccatctggcctgggactacatgcttgagcaggcgttgcagcgtttcgacttcgatcagcggcacgtcgccgtagaggatcagcacagtatccgcggtgataaacggcacggcctgcgcggtggcgtggccggtaccgagttgtttgtcttgaagaacgaaattcaagtcgtctgcggcgagacgttcacgcaccgcatcggcaccgtgaccgatcaccacgtgaatgcgctgggggtcgagctgtcgggcgctgtggataacatgacccagcatggaattgccggcaaccgggtgcagcaccttgggcagggccgaacgcatgcgggtgccctggcctgcggcgagaatgacgatttcaagagacatgagtggctaccaatcctgggcggtccggcttcagaccagagaagtgttttgcaaaaaaagaaaaagggtagccgaggctaccctttttaatcaatcgcgcatgaaacaagaaggcgtggccgcttacttcttgcgcaactgctggagcgtgcgcagctgggctgcagcctcggccaaacgtacagcagcagcgctgtagtcgaagtccgcacccttttcgttcagggccttctcggcagccttgacggcttcctgagcggaggcttcatccaggtcgccagcacgttgcacggtgtcggcaagtaccttgaccatgttcggctgaacctcgaggaaaccaccagagatgtaaaacacctccttttccccgccctgcttggtcagcgtgatcggacctggcttcaagctggtgatcaacggcgcgtgacccatggcaataccaaggtcaccgagttcgccgtgtgcaatcaccatctctaccagaccggagaagatttccccttccgcgctgacgatatcgcaatggactgtcatagccatctgattgcctcaacctgatgagcgcccgtttccgggcgcctggattacagtttcttggctttctcgatcgcttcttcgatgccgccgaccatgtagaacgcttgttctggcaggtggtcgtagtcaccgttgaggatgcctttgaagccagcaatggtgtctttcagggaaacgtatttacccgatgcaccggtgaagacttcagccacgaagaacggctgcgacaagaagcgctggatcttacgagcgcgggataccaactgcttgtcggtttccgacagctcgtccatacccaggatcgcaatgatgtccttcagttctttgtaacgctgcagcacgtactgaacgccgcgagcggtgtcgtagtgctcctggccgatcacgttcgggtccagctggcgcgaagtcgagtcgagtggatcgaccgctgggtagatacccagggaagcgatgtcacgggacagtacgacggtggcgtccaagtgggcgaaggtggtcgctggcgacgggtcggtcaagtcatccgcaggtacgtataccgcttggatcgaagtgatcgaaccttccttggtcgaagtgatacgttcttgcagaacgcccatctcttcagccagggtcggctggtaacctactgcagaaggcatacggcccagcagtgcggatacttcggtaccggccagggtgtaacggtagatgttgtcgacgaacagcagaacgtcgttaccttcgtcacggaacttctcggccatggtcaggccagtcagtgctacgcgcagacggtttcccggcggctcgttcatctgaccgtaaaccagtgccactttgtccagaacgttggagtccttcatctcgtggtagaagtcattaccctcacgagtacgctcacccacaccggcgaacacggaataaccgctgtgctcgatggcgatgttacggatcagttccatcatgtttacggtcttgcctacaccggcaccaccgaacagaccgactttaccgcccttggcgaacgggcaaaccaggtcgataaccttgatgccggtttccagcaggtcgttgccgccagcttgttcggcgaacgaaggtgctggacggtgaatgccccagcgctcttcggtgtcgatcgggccagcttcgtcaatcgggttgcccagtacgtccatgatccggcccagggtcgctttaccgaccggtacggagatggcagcgccagtgtcgacaacgtccagaccgcgcttcaagccttcggtggaacccatcgcaatggtacgaactacgccgtcgcccagctgctgctgaacttccagagtagtttccgcgccttgtactttcagcgcgttgtagatgctcggtacgctgtcgcgtggaaattccacgtcgataacggcgccgatgatttgaacgatacgtccgctactcatagctggatcctctgaatatttgaaccgttaaaccgcggcagcgccgccgacgatttccgagatctcttgggtgatcgcagcctgacgcgccttgttgtagatcagctgcaaatcgctgatcagatcaccggcgttatcggtagcgtttttcatcgcgatcatccgcgccgcttgttcagctgcgttgttctcgaccaccgcctggtacacctgcgactccacgtagcgcaccatcaagccgtcaagcagctctttggcgtctggttcgtagaggtagtcccagtggtgcttgagttcctgatccggggtcgccaccagtggaatcaactgctccacggttggctgctgggtcatggtgttgatgaacttgttggataccacggacaggcggtcaatccggccttccaggtacgcatccagcatcaccttcacactgccgatcaaatcattgatcgacggctcttcacccaggtggctgatagctgcaacgacgttaccgccgaagttgcggaaaaaggccgcacccttgctaccaacgacacacagatcgatctcgacgccgttttcgcggtttaccgccatgtccttgaccagggccttgaacaggttggtattcagaccaccgcacaaaccacggtcactgctcacaaccacataacccacacgcttgactgcgcggtcgatcatgaacgggtggcggtattccgggttggcgttggccagatgcccaattacctggcggatacgctccgcataaggacggctagcagccatgcgcatttgtgccttgcgcattttgctgaccgccactttttccatggcgctggtaattttttgcgtgcttttgatgctcgcaatcttactgcgaatctcttttgcgcctgccatgtaacacctatcaggttagcaagcgggagccttgcggctcccgctgcggcttaccaggtttgggtggccttgaacttctcgataccggctttcatgccagcgtcgatatcgtcattgaagtcacccttcacgttgatcttcgccatcaattcggcgtgatcgcggttgaagtaagcaatcagcgcttgttcaaagctgccgaccttggcgatttcaacgtcggtcaggaacccacgctcagcggcatacagcgacaacgccatgtcagcgatcgacattggggcgtattgcttctgcttcatcagctcggtaacgcgctgaccatgctcaagttgcttacgggtcgcttcgtccaggtcagaagcgaactgggcaaatgccgccagttcacggtactgagccagagcggtacggataccaccggacagcttcttgatgatcttggtctgagcggcaccacccacacgggataccgaaacaccggcgttcactgcggggcggatgcccgagttgaacatggccgattccaggaagatctgaccgtcggtgatggaaatcacgttggtcggaacgaacgcggaaacgtcgccagcctgggtttcgatgatcggcagtgcggtcagggaaccggttttgccggtcactgcgccgttggtgaacttctctacgtactcttccgaaacgcgggatgcgcgctccagcagacgggagtggagatagaacacgtcgcctgggtaagcttcacggcctggtggacggcgcagcagcagggaaatctggcggtaagccactgcttgcttggacagatcgtcataaacgatcagcgcgtcttcaccgcggtcgcggaagaattcacccatggtgcaaccggagtacggtgccaggaattgcagcgcaggagactccgaagcactggcagccacgatgatcgtgttggccagggcaccgttttcttccagcttgcgaaccacgttggcgatggtcgattgcttctgaccgatagcgacgtagacgcagaaaatgccgctgttcttctggttgatgatcgcgtcgatcgccagagcggttttaccgatctgacggtcaccgatgatcagctcacgctggccacggccgactgggatcatggcatcgacagccttgtagccagtctgtacaggctggtctaccgacttacgccagatcacgcctggagcaactttctcgaccgcgtcggtctcggtgttgcccagtggacctttaccgtcaacagggttacccagtgcgtcgactacgcgacccagcagttccttaccaaccggaacttccaggatgcggcctgtgcacttggcgctcatgccttcagccagactggtgtacgcgcccaatacaacggcacctacggagtcttgctccaggttgagggccataccgtagacgccgcccggaaactcgatcatctcgccgtacatgacgtcggccagaccgtgaatccgcacgatgccgtcagatacgctgacgacagtgccttcgttacgggcttgggaggtcacatcgagcttgtcgatgcggcccttgataatttcacttatttcggaaggattgagttgctgcattgctctgctgccccttcaaactcaagatttcaatgcttcggcaagtttcgcgatttttccgcgaatcgagccatcgataaccaggtcgccggcacggataacaacaccaccaatcagggatgcgtcctccgaagcttgcaggcgcacttcccgattgagtcgtgcactgagaaccttggcgagtttgtcttgctgttcttggttcaatgcgaaagcactggtcacttcaacgtctaccgatttctctgcttcggccttgtacaagtcgaacagagcggcaatctccggcaacagcgggagacggtcgttttcggcaacgacgtgaatgaagttctgcactttcacatcaaacttgtcgccgcacacttcaataaaagtggcggccttgtctgcgctcgtcaggcgcggggccttgagcacgcgctgcatggtgtcgtcttgcgacactgctgcagccaggccgagcatggctgaccaagaggccagctgctggtgggcctgggcgtgctcgaaggctgccttagcgtaaggtcgggccaacgtggtcagttctgccatgatcgccctcgcttaaatttcagcagccagtttgttaaccagctccgcgtgcgcgttttgatcgattgtggcaccgaggatcttctcagcaccgccgaccgccagagcacccagttgggcacgcagcgcgtctttgacgccgttcagttcctgttcgatctcggcatgagccgaagccttcacacggtcagcttcgacgcgggctttttcaacagcctcttcgacgatctggttaccgcgtttcttggcttgctcaatgatttcagctgcctgtgccttagcatcgcgcagttggtgacccgctttctcttgggccaactccaggtcgcgagctgcacgggtggcagcgtccaagccatcagcgatcttcttctgacgttcgtgcaaagccgcgatgaccggaggccacacgaacttcatgcaaaacactacaaaaatgaagaacgcaacggattggccaatcagggttgcattaatgttcacgccaacacctcgctcattcgttgtccatcactccaatcaactcgaaaattcgagtgattagccagcgagttgaccaacgaaggggttcgcgaaggtgaagaacagagcgataccaacgccgatcatggtcacggcgtcgagcaggccggcgacgatgaacattttaacttgcagcattgggaccatttctggctgacgcgctgcgccttccaggaatttgccgcccagcaggccgaaaccaatggcagtacccagggcgcccaggccgatcaacagtgcaacagcgatagcggttagaccaactacagtttccatctttcctcccgacttttacgtcgtatggtttaggttttttagattttaaagcggtaaaacaaatcgtttcatagcccggtagggcctaccttcccgtttcaccgggaaggacatcagactagtcgagactggtcttaatggttctcttcgtgcgccatcgacaggtagacgatggtcagcatcatgaagatgaaggcctgcagggtgatgatcaggatgtggaacacagcccacgcccactgcagaaccacgcccaggccgctaagccagagcagaccactgccgaacatcacagcgatcagaatgaacaccagctcgccggcatacatgttgccgaacagtcgcagggccagggagatcggcttggcgaccaaggtcacgaattccagcaggaagttcaccgggatcagcagggcttgaacgaagatgttcttgctgccgaacgggtgcagggtcagttcgccgatgaagccgccgatacccttgaccttgatgctgtagaaaatgatcaacgcgaacaccgacagggccatgcccagggtggcgttagggtccgtggtggaaaccgcacggaatgggatgtggtggtcgccggagatcaggatagccagttgaggaatccagtcgaccggtaccaggtcgacggcgttcatcaggaacacccagacgaagatggtcagtgccagcggtgcaatcaccgggctgcggccatggaagctgtctttcacgctgccatcgacgaattcgaccagtacttcaacgaagttctgcaaagcacctggctgaccggaagtcgccttctttgccgccatgcggaaaatcaggacgaagatcagacccaatgcgaccgaccagcccagagtatccaggtggaaagcccagaagcccatttctttggcttctgctgcggagtgggcaaagccccagccgccattaggaagctgaccgaaggtcaggttctgcaagtggtgctggatatagcccgaagcggttgtttctgccatggttgcctcaaacgccctaaggtttcgaaagtcttgttttcattagcaggggagcgaaccagctgaccagttgggtcaacacgaagacgccgaatacagccagcggcgccaatggcttcacacctgcaaaggtcagtgcaaacagcactgccgtcaaaatcagtttccccgcctcgccagcataaaatgaccggacgatagcctgggctgctcgggcgccggaaaaccgaaaggccctgtgagcaaaatacatattgggcagcaaggctatcaggcctccgcagagtcctgaatatccgactacgactccatgccaataccaaagcgccaatgcggcgatcagcaagatgacaaattgagccaataaaaccggaaaaacggccaagcgatggaacggcaacgtgtttggcgtgcgggtttccatcactcttgctcctcaatggtcggctgccggaaatcaataacttggcataatttgtgccgacaaaatgcgcgcagagtataggggcggttctgcccctattcaactgccgggtagtgatttccgatcacgcgctacataagcaaatgtttcagcggatgtgggcaaggacgccctgaagctcatcaagggagttatatccgatgaccaattggcctttgcctttcttcccgtggcgaatttgcaccgcagagcccaggcgctcggccaggcgctgctcgagacgggcgatatccggatcaggtttggccgtttcgaccggtgcaggtttgccgctgagccattggcgaaccagggcctcggtctgacgaacggtgagcccccgtgcgacaacgtgtcgcgccccttcaacctgttgattttccggcaaaccgagcagtgcacgggcgtggcccatttccaggtcgccgtgggacaacatggtcttgatgacttccggcaacgcgatcaggcgcagcaagttggacacggtcacgcgggatttacccaccgcttcggccacttgttgctgggtcagctggaattcctgctgcaaacgctgcagggcgatggcttcttcaattgggttgaggtcttcgcgctggatattctcgatcaacgccatggcgatggcggtttcatccggcacatcgcgcaccattgccggaatggtttccttgcccgcctgctggctcgcgcgccaacggcgttcaccggcaatgatttcaaagcggccgccaccgatcgggcgtaccacgatcggctgcatcacgccctgggccttgatcgaattggccagctcttccagcgcctgggggtccatgtcccggcgtggctggtatttgccgcgctggatcaggtccagcggcaggtgttgcagctcgcgctcgtcggcctgcaccgcttgttcttcaagcgatgtgacggtcggaccactcaacagtgcatccagtccacgtccgagacctcgtttcttgacggccatggggattccttaagttggctgggctgcagcagtgcgtgaattgcggcgttggcgacgaaccatctcgccggccagcgccaggtaggcaatggcaccacgggattgtttgtcgtaggccaaggccggcatgccgtagctcggggcttcggccaaacggatgttgcgtgggatcaccgtgtcgtacagctggtcaccgaagtgttccttgagctgcgccgatacatcgttcatcaggctcaggcgcgggtcgaacatggtccgcagcaagccttcgatctgcaggttcgggttgagcaactcggcgatgcgcttgatgttatccacaaggtcgctcaacccttccagcgcgtagtactcacactgcatggggataatcaccccatctgccgctaccaacgcgttcagcgtgagcatcgacagcgacggcgggcagtcgatcagaatgtagtcgtaattctcgcggatcggcgccagggcgctgcgcagacggctttctttcatctgcatttccagcagcaccacttccgccgcagtcagatcgcggttggccggcagcagttgataaccaccgtgctcggaatagtgcatggcctgggccaggtcgcactcgccaatcagcaagtcgtagaccgagttttccaggccgtgtttatccacaccgctacccatggtggcgttgccctgtggatcgagatcgatcaacagcacccggcgcttggtcgcgaccagggatgctgcgaggttgatgcaggtggtggttttgcccacgccacctttctggttcgctatcgcgaataccttagccattcttgcttgtgttcccaatcatgccgtgcggcgcagtatcagcagatggcgttggccttggcaaccgggtacggccaaggcgtgttcgctatcgaggtggaagtctgccggcaatgctaacagctcatcgcttggatggacgcccttcattgccagccagcgggtgtcgcggtcgcccaggtggcgggtccagttgctgaagttctccatgctgctgaatgcccgggaaacaattccgttgaaaggctgttcaggtgtgaaggcttcgacgcgactgtggataacttgcaggttgttcagcttgagctcgagtttgacctgggtcaggaagcgggttttcttgccgttgctgtccaggcaagtcacttgggactcgggaaacaggatggccaacgggatgcccggcataccgccgccactgccaacgtccaaccagcggccgttttcgatgaatggcatcacgctcaagctgtcgagcaagtgacgggacaccatctcgtcgggatcacgcaccgcggtcaggttgtaagccttgttccatttgatcaacagggccaggtagcccaacagcaattcgtgctgggccggggtcaggtcgacgcccaactggcgtgcacctgtggataactcttcggcatgttgcgaggtgaccaacgaactcaagcgctttgctccaactgacggcccgcgccgcgttttttcaaatgaatcatcaacagcgaaatcgctgccggggtgacgccggggatacgtgaagcctggcccagggtctctggccgagttatccccagcttgctttggatttctttcgacagcccggaaatcccggtgtagtcgatatccacaggcagtttggtgtcttcactggcgcgcaagcgggcgatctcgtcctgctggcggtcaatgtaaccggcgtatttggtcttgatttcgacctgctcggcgacctgcgggtcttctgcgccctgtccggtcacttcgaccagaccagcgtagtcgatttccggacgggacagcaggttcagcaagttgtattcgtgggtcagtggcgtgccgaatttttcggcaatcgcatcgccctgctcggtgcccgggcggacccaggtgcttttcagacgctgctcttccagcgcgatgctttcgcgttttttgcagaaggcttcccagcgtgcgtcatcaaccaagcccagttcgcgacctttttcggtcaggcgcaggtcggcgttgtcttcgcgcaggatcaggcgatattccgcccgggacgtgaacatccggtacggctcctgggtacccagggtaatcaggtcatcgaccaatacaccgatgtacgcctcatcgcgacgcggacaccagctgtctttaccttgtgcacgcaatgccgcgttggttccggccagcaaaccttgggcaccggcttcttcgtaaccggtggtgccgttgatttgcccggcaaagaacaaaccgccgatcactttggtttccaggctgtacttcaggtcacgcgggtcgaagtagtcgtactcgatggcgtagcccgggcgcacgatgtgcgcgttttccatgccgcgaatcgattgcacgatctggatttgcacgtcgaacggcagggaagttgaaatcccgttcgggtacagctcgtgagtggtcaaaccttcgggctcgataaagacctggtggctttccttgtcggcgaagcggtggatcttgtcttcgatcgacgggcaataccgtggaccgatgccttcgatcactccggagtacatcggcgaacggtcgaggttcgcggcaatgatttcgtgggtgcgcgcattggtgtgggtgatccagcagctcacctgtttcgggtgctggtccttggagcccatgaacgacatgaccgggatcggtgtatcgccggcttgttcggtcatcaccgagaaatccacggaacgcccgtcaatacgcggcggggtcccggttttcaagcggccgacacgcagcggcagttcacgcagacgttttgccagggcaatcgacggcggatcaccggcacggccaccggaatagttctgcatgccgatgtggataagtccgccgaggaacgtaccggtggtcaacaccacggattctgcgaagaaacgcaggcccatttgggtgacaacaccgcgcacttggtcctgttcgacgatcaggtcatctgctgcttgttgaaatatccacaggttcggctggttttccagggtttcgcggaccgcggccttgtacaggatgcggtcagcttgagcccgggtagcacgtacggccgggcctttgcggctgttgagcacgcgaaattggataccgcctttatcagtagccatggccatcacgccgccaagggcatcgatttccttgaccagatggcttttgccgatcccaccaatggcagggttgcaactcatggcaccgagggtttccacgttatgcgtcaacaacagggtttttacgcccatgcgtgctgacgccagtgctgcctcggtaccggcatgaccgccgccgatgacgatcacttcaaaacgggaagggaaatccaccacgcacctcgtgcctgcttatttaggtaatcaggaattgattgttgaaagagttttagagctttggcggcaagtatagggacttagcccttcctaaagaaccctttgcacaaaatttaaccagctgtggatgaatcacagacaatagaaattaaaagagagaaatttattaaatctttgtttttatgtttatttctactgagctgactttctgtggatagatttacacaggcctttatttacggtgtgtacagcgattcaaaagtctgtggtcatgtgccaatgaggcccttggataagtgctttaagcctgtggattaaacaggttgttatccacagatgcgtttttgctcaggtttcagggcctgttatcaactgggcacaggggcggttattcacagagcttaatccacagaaatcagtgaatttgtctgtattcagcccacgacaacgccaaccgaaaccttccactcggtggtgagcacagcaaaaagagatctgttgtgagaaaacggcggggcagttaataatagcgattatcattaacctaccttgtcatgccctatgtcctcttcttcacacacggctgcggtccagcacatctatgagcagcaccactcctggctgcacggatggctcaaagggaagttgcataacgcctgtgatgcggccgatgtggcgcacgatacgttcgtacgcatcctgggcgggcgccatgcggcacagatcgttgagccgcgtgactacctggcgactatcgccaggggcctggtgattgatcgttaccgtcgacacgcgatcgaacaggcctacaaacaaaccctggccgaacggcctgaagccataaccatcagtgaagaagacaaagccatcatcatcgagacgttggtggctgtggataaagccttgtctgcactcggcgagcgagcgcggcggatattcatgctgtcccaggtcgaagggctgacttatcaacagatcgccgatcagcttcaggtttcactgaccacggtgaagaagcacatgatccgagcgttgactgaatgtgcgctgatcatggccagcctgtgatggcggtgcccgatcgcaagaccttcgaggccgctgccagttggtacgtccagtttcaatcccagacacccaccgccgatgagcgccaagcctggcaacgatggctcaacggcgatccgtcccatcaggctgcgtggaaccagatggaacagctgcagcgcagtctcggcgcgctgcctgcggatttcacccgccgcgcattgtcgaccacacagcaacgccgccaggtgctcaagtggatgttggtgctgggcggcaccgggtacctgggttggaatgttcagcaacacacgtccctgggtagtgtgtgggccgattatcggacggtcgtaggtgaacgccggcgcattgaattggccgacggcacgcggattgatctgaataccggcacggcgattgatgtgctgtttgatgggcgccagcgtttgatccgcctgcgcgaaggtgaggtccttatccacaccggcaagcggggcgtgcagacgcccttttatgtcgaaacccgccaaggccgcatccaggcattgggcactcggtttaccgtgcgccagatgcatgactcaacccgcgttggcgttctggaggatcgggtgaatgtgtcgcctggtgaccagcccaaccaggctcggctgctcagtgcgggtgaaagcgcagacttcgatcgccaaatagtgcagccaaacgccgtttaccgcacatcccaggcagcctgggtcgatggccaactgatcgtattggatgcacgcctcggtgatgttgtcgaagaactcgcccgctatcgcccaggtgtcctgcaatgcgaccgggactcggcacatctgcgtgtttccgggacttttcgcctggattccaccgatgcggtgctggccaatctgcaggccaccctgccgattcaagtgaaatacttcactcgctattgggtttcggtgaagcgaatcggctgatcgaaaaaatatacgcacgcagggttatcttttttttacctgacacggccctacaggtaatcacgatgccaccttcagggcttacccacctatgcgcgttcccaccaagctccgccagcgactttcctaccacggtatgacatgcagcctgctgctcggcacggccgccactgtcggtgtgttgttatccacaagcgccctggccgccagcgcggtgcagcactacgttattgcggccggccccctggataacgccttgagccaatttgccgccaaggcgaatgtgatcctgtctttttcacctcagcaaaccacgcgtttaaacacagctgggctggaaggtgactactccgtggaccaaggttttgcgctgctgctgcaaaactccggtttacaggcggtagtccaggcgcctggcagttatgtcctgcaggccgcttccaccggcgaactcacgctcgcgcccaccacggtcagcacttatcaacagggcggtttcaatcaggagattgctggagatgtgggctacaaggcgcagaacagtagagttggtaccaagaccagtacgccgctgtcggaaacaccacgttcggtatcggtcgtcaccggccagcgcatcaaggaccagaagtcgcaaaccctgaccgaagtgttgggctacgtgcccggtatctttgcaccaccctttgccgccggtgatgggctggcgggcgatctgttcttcattcgcggttttaatgccacggattacggctacggcctgctgcgagatggcctgcgtgtacaaggtaatcggtacgacaccaccagtgagccctatggcctggaacgggttgaaatcttccgtggtccttcttccctactctacggcgaaaatgcgcctggcggtctggtgaacctggtgagcaaacaccctactgcgacgccgcaaggtgaagtgcagttgggttatggctcgaataatcggcgtcagttgggtgtggatatctccgggccgctcaatgacagcggcaatatccttggccgggtagtgatgctcggtcgcaaatccgacacgcagaccgaccatgtgccagacgatcgcctatacatcgcgccatcactgaccctgaatttcgacgactacaacaccctcaccctgttggccaattaccagaaagaccacactaatttggaactcggcctaccggctgccggcaccttacttacaaaccccaatggcaagctctccaagcacactatgctcggcgacccggattggaatacgtttgaacgcgaagcctggagtaccggttacgaattcagccacagcttcaacgatgactggcagttccgtcagaactcgcgctacatgcagtctcgcatcaaccgccatgaaacctggcccagcgcgctgaacaatcgcggcttcgggactcagttgaacatgaccgcttatgaccgctacaacaagtcgatggtctattcgctggataaccagctggaaggcaaattccaggtcggcggcctggaaaacacggtgctgttcggtgccagctatgaccgcacttcgttcagtcaggattgggacgcggggtttgccggcaccatcaatgtgtataacccggtgtacctgcgtgacccgctgacgccggtggcggtgcaaaacaccctgctcgaacagcagatgaaaggcgtttatgcacagatccagagcaagtacgaccactggctgttcctgctgggcggccgtcaggactgggtcgacagcgatttccgcgacaaggtcaacaaggccagcaacaccggatccgatgaccgcaagttcacctaccagggcggggtgatgtaccagttcgacaacggcctgacgccgtatgtcagctactccactgcctttgtccccgtgcagcagatctccaacgccggctcgcccttgaaaccgatcaccagcagccagtacgaagtgggcgtgaagtacgagccgatcggctgggatacggcgatgacggtgtcggtgtatgacttgcgcaaggaagacgacacttacctcgatgccaccaccaatagctatcgccaagtgggcgaaagccgggccaagggcgctgaggtagaggtcaacagtaacctcacgcctaacctcaatgtcaccgcagcctatacctacactgacgcgaggattaccaaggattcggcgacatcgttggtcgagggccaccagatgaccggggttccgcgtaaccaggcctcagtgtggggcaagtaccgcttcctcgatggccaactcaagggcttgtccctgggcggtggtgtgcgttatttcgacagtaccttttcctacaccgcacccacgctttacggaaaattggatgcaggaagcgtcaccttggtggacgcagccgttggctatcagatagacaaacactggtctgtggatgtaaatgccaagaacctgttcgataaggaatatgtatctggttgcaacgatgcgggccgctgctattggggtgacagccgtaccctgctcggtacggtgtcttacaattggtaggacgctgtggataactcggttatttaccgatgcagaagctggaaaagatccgccccaacaaatcatcggagctgaacgcgccggtgatttcgcctaacagctgctgtgcctgacgcaaatcttccgccagcagctccccagcccccgccaaggttaattgcgcccgaccgtgctccaacgctgcgctcgcatggcgcaacgcctccaggtgcctgcggcgcgcactgaagctgctttccgaggtctgctcgtagcccatgcaggccttgaggtgctctcgcagcagttccaagccttcaccggccgacttcgcactcaggctgatcgtgacgtggccatccgcgctggtttccagcgcaatggcttcaccggtcaagtcagccttgttgcgaatcagggtgaccttggcagggtccggccggtgctcaaggaattccggccacagggcgaaaggatccacagcctcgggcgccgtagcgtccactaccagcaatacccgatccgcctcgccgatggctttgagcgcgcgttccacaccgatcttttccacctggtcgtcggtgtcgcgcaaaccggcggtgtctacaacgtgcagcggcatgccgtcgatgtggatatgttcgcgcaggatatcccgtgtggtgccggcaatctcagtgacgatggcggcttcacggcccgccagggcattgagcaagcttgatttccccgcattgggccgccccgcgatcacgacggtcatgccatctctcagcaaagcaccctgcccggcttcacgcagcactgtggataactcatcgcgaactttatccagcatcgccaatacgtggccatcggcgagaaagtcgatttcttcttccggaaaatcaatcgccgcctcgacgtagatacgcaggctgatcagttgctccgtcaagttatgcacacgcagggagaacgcaccctgcagggagcgcaatgcattacgtgcggcctgtgcagaactggcttcaatcaggtcggcaattgcttcggcctgggccagatcgagcttgtcgttcaagaacgcccgctcgctgaattcacctgggcgcgccaagcggcagcccaattgcaggcagcgctgcagcaacatatccagcacaaccggaccgccgtgtccctgcaactccagcacatcttccccggtgaatgagttcggcccagggaaatagagcgctaatccttcgtccagcacgccgccgtcagcatccaggaactggccgtaatgtgcataacgcggcttcaactcacggccactgatggccttggctgccacgcccgcgagcggccctgaaattctaacgatgccgacaccgccgcgaccttgagcggtagcgacagcagcgatggtttcacgaggagcgctcatcaacagtttccagaccaaaagtgacagaaagcaaaacgccccactagggggcgtcttgagtggttatccacagagtaagttacgcagaggcttttgcggtagccgcttcgatcttacgtgtgatgtaccactgttgagagatcgacaacacgttgttgaccacccagtacagcaccagaccagctgggaaccacaggaagaagaaggtgaagatgattggcatcattttcatcactttggcctgcatcggatccggcggagtcgggttcaagcgctgctggataaacatggtcgcgcccatgatgatcggcaggatgaagaacgggtctttgatcgacaggtcagttatccacaggatgaacggcgcctggcgcatttccacgctttccaggagtacccagtacagcgacaggaacaccggcatctgcaccagaatcggcaagcatccacccagcgggttgatcttctctttcttgtacagctccatcatggcctgcgacattttctgccggtcatcgccatgttgttctttcagcgccgccagtttcggagccacggcacgcatgcgcgccatcgacttgtagctggctgccgacagcgggaagaagatccccttgatcagcatggtcaggaagatgatcgagaagccccagttacccacaatgctgtggatatgttgcagcaaccagaaaatcggctgggcgatgaaccacaggaagccgtaatccacagtcagctcaagacctggggacaactctttcagcacagcctggcttttcgggccggcgtacaggatagcgctggtttcagccttggcgccgggtgcgacggtcaacgccgggccggtaaagccaatgatgtagttaccttggctgtccttgcgggtttgaaccaggttggcttcacccttgttcgggatccatgcggtcacgaagtagtgctgcagccaggcaacccatccgccttgaacggtttctttcagcgagcccttgtcgatatctttcatcgacacttttttgtacggctcgctacttgtccacagggcggcgcccaggtaagtcgcggtgccggtagcagtgctggaagaaggatcggagctggcatcacgcttgagctgggcaaacaggttgccgctccatggtttgtcgctttcgttgtcgatcaggtaagtgaccttcaagtcgtacaaaccacgggtgaagctgaagcgcttgatgtagttgacgccgtcgaggctgaatttcaggtcgacgttcaactggttctggccatcagccagttgataagtcttctgttcggtcgagtaaatcggacgaccggtagcacgtgcatccggaccattggtgccggtcaggccgctttgcgccagataagtacgctcaccaccgttatcgaacagttggaacgggacatccggatggtcttggcgacgtggatacagcggcagtttcaactgcgcaatatcaccaccttgtgggtcgatagccaggtcgagcacatccgttttgacgtggatgaggtctttgttggtgaccactggcgtttctaaaggggcgcttgtctcgccattcgcgctgggaacatcggcactcgcggacgcattgttacccagcggggtgtccggaatagccggcgcagcctggttggtagcaacattctgagtcggcagggcagcctggccgtagtcctggttccactgaagaaccatgacgtaggacacgattgccagggcgacgatcaggatcgtgcgtttaatatccatgattactcggccatcgaagaagaacgggaggtagggataggtggaaccgggtcataaccaccgggattccacggatgacagcgacctaaacgacgaaaggtcagccagccaccgcgcagaagaccatggttttctatggcctctaacgcgtagcaggaacaactggggtagaaacgacagtggttggccatcagaggactaatggcatagcgataaaactggatcggaacgagtgccagtttacgcatcaaggctgtctacccctacagtttcggtgctgactgctggtgctggcttgtgggtacgcgccaaacgtttccagagcttgccgaaatgctgaatcaattcggggttttctacgtcccccaagcctttgcgcgcgacgataacaatatcccaaccaaccagagtgtcctggtggaggcgaaacgattcgcgcatcagacgcttgaggcgattgcgctcaacggagagctttacgctcttcttgccgatcaccaacccgagtcggggatgatccagatcgttgttacgcgcaaggagcaggagatttttccccggaaccttgccggtgggggagtcaaagactgccttgaaatgccggggggttagcagacgcttttcccgactgaagtcctgactcaccaccagtaccggattatcaaactgccagacgcgcacgacctttggcgcgacgacgcgacaggacagcacggccgttcttggtagccatgcgagcacggaagccgtgggtgcgggcgcgtttgatggtgcttggttggaaagtacgtttcatggcgttgttacctggttcgtccacaacgggccggaatggcccccgttttaagagaccggcgattctagtgaaagcaagcctctaggtcaatttccaaccagcttttcctttaattagatctccacaggccattggctcttttctgtccgtttggtttccagtggtcatgggatagatataaaaataaagaaggaagttatttaaagcttttctgtaaagcttataaaagctaggtaggcgttcatctgtggataactcacttgaggccatattccacctggtgtacagagaatgacaacccgggggagaaacggtgctctgcctgtgctgcgctgtcggataagctgtgcgtggaacgggatgttatccacaggccagttacccacagactttctcccccacttgtgcaacgacctcaggtaggcttatccacagagcttatgcacagaccattggtcgcctttattaccgttaagacgttgattttggccggcctgtgatcaagctacatgtggataagtggacggctcgccgctacaatggcggctgtttttgcctcaccggctttcaacttaggggatatccgtgtcagtggaactttggcagcagtgcgtggagcttttgcgcgatgagctgcctgcccagcaattcaacacctggatccgtccgctacaggtcgaagccgaaggcgacgagttgcgtgtctacgcacccaatcgttttgttctcgattgggtcaacgagaagtacctgagccgcgttctcgaattgctcgatgaacatggcaacggcctcgcgcccgtgctctccttattaataggcagcaaacgcagctctgcacctcgagctgctccgaatgcgccattggccgctgcggcgtcgcaagcccaggcagccgccacaccggctgccagtgcgcctgctcctgcaccggcggcgtccaaatcgtctgcgcgaaaaagtgcgccagaaaacgaagagccatcccgcgatagctttgacccgatggcaggcgccgcgtcccagcaagccccggtccgcgccgaacagcgcaccgtccaggtcgaaggcgcgctcaagcacaccagctacctgaaccgtacgtttaccttcgagaatttcgtcgaaggtaaatccaaccagttggctcgcgcagccgcctggcaggtcgccgataaccccaagcatggttacaacccgctgttcctttatggtggtgttggcttgggtaagacccacttgatgcacgctgtgggtaaccacctattaaagaagaacccgaatgccaaggtcgtgtacctgcactcggagcgcttcgtggctgacatggtcaaggccttgcagctcaacgcgatcaacgagttcaagcggttctatcgctcggttgatgcgttgctgatcgatgacattcaattctttgcccgcaaagagcgttcccaggaagagtttttccacaccttcaacgccctgctcgaaggtggccagcaggtcatcttgactagcgaccgttatccgaaggaaatcgaaggcctggaagaacgtctgaagtcgcgcttcggctggggcctgaccgttgcggtagagccgccggagctggaaacccgcgtcgcgatcctgatgaaaaaggccgatcaggccaaggtcgacctgccacacgatgccgccttctttatcgcccaacgcatccgctccaacgtgcgtgaactcgaaggtgcactcaagcgggtcatcgcgcactcacacttcatgggccgcgacatcaccatcgagctgattcgcgaatccctcaaagacttgttggcgctgcaggacaaactggtgagtgtggataacatccagcgcaccgtggccgagtactacaagatcaagatttccgacctgttgtccaagcgccgttcgcgctcggtggcacgtcctcgccaggtggccatggccctctccaaggagttgaccaaccacagcctgccggaaatcggtgatgtgtttggcggacgcgaccacaccacggtcttgcacgcgtgccgcaagatcaatgaacttaaggaatccgacgcggatattcgcgaggactacaagaacctgctgcgtacactgaccacttgatgacaccagcgcagcttattaaggcaagggactagaccatgcatttcaccattcaacgcgaagccctgttgaaacccctgcaactggtcgcaggcgtcgtcgagcgccgacagaccttgccggtgctctctaacgtattgctggtcgtccaaggccagcaattgtccctgaccggtaccgacctggaagtcgagctggtcggccgtgtacagctggaagaacccgccgaacccggcgagatcaccgtgccggcgcgcaagctgatggacatctgcaaaagcctgccgaacgatgcgctgatcgacatcaaggttgatgaggcgaagttggtcgtcaaggccggccgcagccgcttcaccctgtccacgttgccagccaatgatttcccgacggttgaagaaggcccgggttcgctgacctgcagcctggatcagagcaagctgcgtcgcttgatcgagcgcaccagctttgccatggcccagcaggacgtacgctactacctcaacggcatgctgctggaagtgtcggaaggtatcatccgcgccgtcgctaccgacggtcaccgtttggcaatgtgttcgatgcgtgccgatatcggccaaccggatcgtcaccaggtgatcgtgccgcgcaaaggtatccttgagctggcgcgtctgctcaccgagcccgaaggcaacgtcagcatcgtgctgggccagcaccatatccgcgccaccaccggtgagttcacattcacttccaagctggtcgacggcaagttcccggattacgagcgcgtgttgcctaaaggtggcgacaagctggtgctgggcgatcgccaagcgctgcgtgaagcgttcagccgtaccgcgatcctgtccaacgagaagtaccgtggtatccggctgcaactggccaacggtcagttgaagatccaggcgaacaacccggagcaggaagaagcggaagaagaagtgggcgttgactacaacggtggttcgctggaaatcggcttcaacgtgagctatctgctggacgtgctgggtgtgatgaccaccgaacaggttcgcctgattctgtcggactccaacagcagcgccctggtgcaggaatccgacaacgacgactcggcttacgttgtcatgccgatgcgcctgtaaccatgctcagcagaagctagatgtccctcagtcgcgtctcggtcaccgcggtgcgcaatctgcacccggtgaccttctccccctctccccgcattaatatcctccacggcgccaacggcagtggcaaaaccagcgtgctggaagccatacatctgttggggcttgcccgttcctttcgcagcgctcgcctgttacctgtcatccagtacgagcaattggcctgcacggtgtttggccaggtcgaactggctgaaggtgggcacagcagcctgggcatatcccgagatcgcggtggagagttccagattcgtattgacgggcaaaatgctcgcagtgccgcgcagcttgcggaaattctgccgctgcaattgatcaaccccgacagctttcgtttgttggaaggtgcaccgaaaatccgcaggcagttcctcgattggggagtgttccacgtggaaccacgtttcatggccacgtggcagcgcttgcagaaggccctgcggcagcggaactcatggctgcggcatggtacacttgacgccgcttcgcaagcggcctgggaccgggaactgtgcctggccagcgacgaaatagatgaataccgccgcgcctacatcaaagccttgaaaccagtctttgagcagactttgagtgagttgttggacctcgaagggctgacgctgagttactaccgtggttgggataaagaacgtgagctgagtgctgtgctcgcgacgtccctgcagcgggatcagcaaattggccatacccaggccggaccacaacgggctgatttgcgccttagattaggcgctcacaatgccgcggacatcttgtcccgtggtcagcagaagttggtggtgtgcgcgttgcgtatcgcccagggccatttggttagccaggctcgacgcggtcagtgtatttatctggtggatgacttgccgtcggaactcgacgagcagcaccgccgcgcgttatgccgcttgttggaagaattacgctgccaggtgtttatcacttgtgtagaccacgaattattgagggaaggctggcagacggaaacgccagtcgctttgttccacgtggaacaaggccgtatcacccagacccacgaccatcgggagtgaaggcatgagcgaagaaaacacgtacgactcgaccagcattaaagtgctgaaaggtttggatgccgtacgcaaacgtcccggtatgtacattggcgacactgatgacggtagcggtctgcaccacatggtgttcgaggtggtcgacaactccatcgacgaagctctggccggtcactgcgacgacatcagcatcatcatccacccggatgagtcgattaccgtgcgcgacaacggtcgcggtattccggtagacgtgcataaagaagaaggcgtttcggcggcagaggtcatcatgaccgtgctccacgccggcggtaagttcgacgacaactcctacaaagtctccggtggtttgcacggtgtgggcgtgtcggtagtgaacgcactgtccgaagagctgatcctgactgtgcgccgtagcggcaagatctgggaacagacctacgtccacggtgttccacaggaaccgatgaaaatcgtcggtgacagtgaaaccaccggcacccagatccacttcaagccatcggctgaaaccttcaagaatatccacttcagctgggacatcctggccaagcgtattcgtgaactgtcgttccttaactccggcgtgggtatcgtcctcaaggacgagcgcagcggcaaggaagagctgttcaagtacgaaggcggcttgcgtgcgttcgttgaatacctgaacaccaacaagactgcggtcaaccaggtgttccacttcaatatccagcgcgaagacggcatcggcgtggaaatcgccctgcagtggaacgacagtttcaacgagaacctgttgtgcttcaccaacaacattcctcagcgtgacggcggtacgcacctggtgggtttccgttccgcactgacgcgtaacctgaatacctatatcgaagccgaaggcctggccaagaagcacaaagtcgccaccaccggtgacgatgcgcgtgaaggcctcaccgcgattatctcggtgaaagtgccggatcccaagttcagctcccagaccaaagacaagctggtgtcttccgaagtgaagactgccgttgaacaggaaatgggcaagtacttctccgacttcctgctggaaaacccgaacgaagccaagctggtcgtcggcaagatgatcgacgcggcacgtgcccgtgaagcggcgcgtaaagcccgtgagatgactcgccgtaaaggcgcactggatatcgctggcctgccgggcaaactggctgactgccaggagaaggaccctgccctctccgaactgtacctggtggaaggtgactctgctggcggttccgccaagcagggtcgtaaccgtcgcacccaggctatcctgccgttgaagggtaagatcctcaacgtcgagaaggcacgcttcgacaagatgatttcttcccaggaagtcggcaccttgatcacggcgttgggctgcggtatcggtcgcgacgagtacaacatcgacaagctgcgctaccacaacatcatcatcatgaccgatgctgacgtcgacggttcgcacatccgtaccctgctgctgaccttcttcttccgtcagttgccggagctgatcgagcgtggctacatctacatcgcccagccgccgttgtacaaagtcaaaaaaggcaagcaagagcaatacatcaaagacgacgacgccatggaagagtacatgacgcagtcggccctggaagatgccagcctgcacttgaacgacgaggctccgggtatctccggtgaagcgttggagcgtctggttaacgacttccgcatggtgatgaagaccctcaagcgtctgtcgcgcctttaccctcaggagttgaccgagcactttatctacctgccagccgtaagcctggagcaactgggcgaccacgcgcacatgcaggactggctggcccagtacgaagtgcgtctgcgcactgtcgagaagtccggcctggtgtacaaagccagcctgcgtgaagaccgtgaacgcaacgtatggctgccagaggtcgagctgatctcccacggcctgtcgaactacgtcaccttcaaccgcgacttcttcggcagcaatgactacaagactgtggtcaccttgggcgcacaattgagcaccctgttggacgacggcgcttatattcaacgtggcgaacgcaagaagcaggtcaaggaattcaaggaagccctcgactggctgatggctgaaagcaccaagcgccacaccatccagcgctacaaaggtctgggcgaaatgaacccggatcagctgtgggaaaccaccatggacccggcccagcgtcgcatgctgcgcgtgaccatcgaagacgccattggcgcggaccagatcttcaacaccctgatgggtgatgcggtcgagcctcgtcgtgactttattgagagcaatgccctggcggtctccaacctggacttctgattctggtagtctgctgaacccaaaaggccaacgctatgcgttggccttttttattgggtgaatatcggctgtctgctgaatgctccacgtggaacattctggtttttagccctgtggtgagggcaccgctacactttccaatcggtaaccgtacccatagatcgtcaacagctgccaccccctatccgcggtcagtcccaacttattacgcagtcgatagatgtgcgtatcgagcggccgcgacgacaccatttcttcgtgggtccaaaaccgctcatagagatactctcgggaaagcggtcgggccaggttggcaaacaagcaactggccagacggtactcgcgttcggtgaggttgatcggtttgcccgcccgggtcacggtcaactccgcatcatcaaaggtcaggtcgttgaagctctgcacttcatggttggctgatttctgcaggccgtggcgacgtagaaccgcagtcaccctagccttcagttcattgggacggaagggcttgctgacgtaatcatcggcaccactgttcagcgcagtgacgatatcgctctctgcatcgcggctggtcagcatgatgaccgcaggcggcgactccatgtgttcacgggtccagcgcaacagagcaataccgctgatatccggcaattgccaatcgagtatcaacaggtcgaaggtttcccggcgcagttggcgtagcaggtcttcaccgcgttcgaaacagtgcagggtccagggttgttcggcggtgctggggatttgtcgcagtgtctgttccacccgtcgcagttccgcgggttcgtcatccagtattgcgacacgcatgggtgggtcctttcttcttgaagagtacggcagccgtcagccgggttagtgatggcacgcactgcgcagatgccggtctctgaatctgaagaattgtgttcagatccgtcgaccccttggatctctcggtacgctggcatcaatgtgcgattaacccattgaaagtccttgataccgatgtgggaaagataccggctcccgcccataaggaaaaggatcagccgacgcatgcgctgccgtacactcctgcttgctggtgtcagataccttctggaacccaatcttgatgagcaccatgatcctttcttcgaaccgcctgtgccgcgccctaccctcattgttgatcatggctgtcggttctgcaggggcggttggcaagacgcgcgcgccttacattgatgatcacatactgtgtcacccccagcccctgccggcggtggttcagcatctcaccggggaagcctggaaaatcgataccaagggcgaggcgagccttttgctggaaggcatgaccattgacgaacaggagggtgtgaagacctcggcgtcggcgttcgtcagcctgttgctcggtgacggatcccgcgtggtgttgcccgcaagttcacaggttcgattgcatctggagcgcaagctgtcgattccccaggttgtactcgaacaaggtcaggcggaagcgtatgtgatcaagcgtgccagcgaccatgatcgttttcagatcgtgacccccgtgggggtgttgggcgtacgcggcacgcatttccgggtgcgtaacgacgctgagcaatcggtgctcgaagtgttggacgggcaggttgccgtcagccgcgaggcaaaaaaccagccgatggaacaggaggtaaaaatcggtgcccggcaaggtctgctgttcaggaagcagggagacctgaaaccggttgagctacttgctgcaccgaagctcgtgggtcaggacggccagaaaggcgatgcgccggtctggagcctgtaccttcggcctttgcccggagcccagcgataccgggcacaggtcgctaccgacaaagccttcatggacatcaagcatgaaaacttttccagttcgccgaaaatgagcttcactgggctcaaagcctcgttctaccacgtgcgcctttcggcctacgatgaaaacgggctggagggagagaccggggtctatgacatcttttactacccacccaccacccaggcacattgacctatgaagctctggggcaagaccgagaaacgccagcccacccatgcccagcgcctgtttcatggcctggtgcgcgagtggttgtggatcgggttgctattgctgcctgttaccgtctatctgtcgttgagccccggcctggcgttgaataatccgctgtacgacagccttcggcgccttaccccgctgcctgtagacccgcgcatcctgctggtgaccattgatgacgccagcctgaaaaagctcggccaatggccctggccacgcagcttgcacgccgacctgatcgaccgcctcagcgctgggcaaccggcgggtatcctcttcgatgtgatcttcagtgagcccggcgaccccgccaatgacaaacgcctggccgaagcggtatgcaatgccggcaacgttttactgccgctggtacgtgagggcactgctagttatagccagcccggtgggcagatgctggcgctgcatagatgcgccaagggcgtgggccacatcaatgtcgaagcggacagcgacggcgtggttcgcagcctgtatctgcgcgaaggacctcccgacacgacggcaccgcaactggcctggctggcctatgagatgagcggggagctatcggacatgccgggcgagccgcagcaggcgacttcacaacactggcaccgcgagcacgccatccgtatcacgtttatcgccccccatacccatttccccagcgtgtcctacgtcagcgtattgcgtggtgaggttcctcccgagcagctaagaggccgcttgatcctggtgggttcgacggcttccgggatgggggatcggttcgtcacccccctctcctccacggtcggtacaacggcaggggtggaaatccaggccaacgtgctcaacggcttcctccaaggccgcagcatcgtcgacctgccgggctggctcgcggcgctgatggcgacttctctggtggcgttgttgctgggcctgctgctctaccgcccgcgctatgcgctgtggatgactctgggctgtatggctgctgcgttacttggcgcctgggccttgttgcgccttggccactggtggtcgcccgccgcatgcctgattggtttgctgcttagctacctgatctggaactggcgtcgcctgagcgtgatcctcgcctacttcggctgggaactggcgcgcctggataacgaacccaaggtcctgcccgaacgccgccgtgcgcccgccagcaaaggcgacgtgctgcaggcgcggatctttgccctggagcaggccgtaagccgcacgcgcgatacacggcgcttcatggcagatgggttggagtgcctgccggtggcgacgctgatcaccgaccccaagggcaacatcctgctggccaaccgcattgcccgcgaagtgttcggcaatgacctggtcaccgaaaacctgctggagcaattggccgacctgggctacccgccgctgcacaatggcgtgcgccctgccctttcggcgctggaactggtcgagttccgcgacatccaccaacgcagcctgcgcatggaattggcgcccttgctgccggccgagggtgatgttgcactgggctggctgttgagcctcactgatttgagcaaggagcgcgaagcgcaacaacaccgcgaaaccatgttgcgcttcctttcccacgacctgcgtgcgccgcactcggcgatccttgcgctgctggatgtgcataacgacgagtccccggtattcgcccagatcgaacagcaggttcgccgtgccttgggcctcactgaatctttcgtgcaactggcgaaagccgaagctgacggttaccagttccagccgacgctgtttgccatgttggtgatggatgcattcgatcaggtggcgttgattgcccagctcaaggggatccacctggttcacgacctggatgaagctgacgagggcatggtctccgctgaccagtcgctgctcactcgggcgttgttcaacgtgctggagaatgccatcaagtattcgccctcgggcaccactgtcaggttgagacacagcagtgcacaaggttggttggaatgccgtatcagtgaccaggggccggggattgcagcagaggacttgccggagctgttcagccaataccggcgctttgaatcggcacagggcagtgaaggattggggttgggcctgacgatggtcaaggctgtggtagagcgccatggtgggcgcatcagctgcgaaagcgtggtaggcaaaggcaccacattcagcgtgcaattacccctgctggaagactgaaaaaacgtactttagtgttgtgaataaaaaaccggtcgcaaggaccggtttttttatgcagaaaaaacttatgcacctttttcttgattttatgggcttgagaaatatgcaataaaatcagcttgttatgattcaaaaagcgcaattcgccaacaaaccgtacacaggttatccacagatgctcagatcaccggagtgtcgaccacaacaggctctggcggcagcgaacccatggcccgttgctgcgcttcattccacgcctgggcgcggtcattcagcgcggcaatggcacgtgggccttcaccttctgcgtacatcggttcgccaatcaccacggtgatggtgccttcgcgcttggcccagccggtctttggccagaacttgccggcgttatgggcaatcggcagcacgggcaggttggcgttgaccgccaaagccgtacccccgcgtgagaacttgcctacggtgccgtagggcacgcgagtcccttccgggaagatcagtacccacacgttatccttgagcagttcatcgcccttcttggccacgtgcttgagcgctgccttggggttgtcgcggtcgatggcgatcggacgcaacatggccatggcccagccgaagaacggcacgtacagcagctcacgcttgagcacctggctcaggggcgagaagtacgccgagagaaagaacgtctcccaggtgctctggtggttcgacagaatcacgcaaggctggtccgggacgttttctgcacccttgatctcgaaacgaatattcagaaacaccttggtcagccacaacgcgcagcggcaccagtagacgttgataaagcgatagcgcgccttgaatggcaaaaagggcgcaataaaaaagctcagggtgcaccagagaaacgaactggtgcccaacagcaggtaaaagaagaaggttctgatggcctgcaaaatcgacatggcggcatttaccgttgcgggacaatgcccgcctgttaaaagcgcactcccgaacagtccttggtcaggaagtcgagggcggctagttgttgataagttctgcggcaacggccgccagatcgtcaaaaatcaaggtgcctaccggcaggtttttcgcctgggtcttttcgcctttcccggtcttaaccaaaactggctgagagtcgacggctttggccgcctccaggtcaccgagactgtccccgacgaaccatagcccagccaagggcaccttgtaatgttctgcaatggttttcaacatgccaggcttgggtttgcggcaatcgcagccctcatctggcccgtgggggcagtacaccaccagccccacctcaccgccctgctcggccaccaatgcgcgcaggcgtgcgtgcatggcgtccaaggtggcgatgtcgtagtacccgcgagcgatgccggactggttggtggcgatggccaccgtccagccggctttgctcaactgcgcgatggcctcgatggagccgggcagtggaatccattccgccaccgacttgatgtaagcgtcggagtcgtagttgatcaccccgtcccgatcgagaatcagcagtttcaccatggtcagctcagcgtcgaaatgtcagcgatattgacgaacaagccgcgcaggcgcgccagcatggcgtagcggtttttccgcacgccggcatcgtcggcattgatcatcacggcttcgaaaaacgcatccaccggctcacgcaaggtggccaggcgcgccaatgcttcggcgtagttgcgctcggcgatcagcggcttcaccgcgttttcggccttggcgatggccgagttcagcgagaactccttggcatcggcaaacaggccagggtcgacatcagcgttgcccaggccttcggccttgctcagcaggttcgacacacgcttgttcacagcggccagggcatcggcttccggcagcttgcggaaggcctgcacggcttgtacgcgctgatcgaagtccagcgccgaacccggctgcagggcacgtaccgacaggtacaccgacacgtccacgccttcgtcttcgtaacgcgcgcgcaggcggtcgaacacaaactccagcacttgctcggccaggccggcctgcttgaccttggcaccgaactggccgacggcaaacaccacggcctgggtcaggtcgaggtccagctttttgtcgatcaggatacgcagcacgcccaaggccgcacggcgcagggcatacgggtctttgctgccggttggcaacatgccgataccgaagatacccaccagggtgtccagcttgtcggcgatcgccacggctgcaccggtcagggtggtcggcagttcagcgccggcaccgcgtggcatgtactgctcgttcagggccagggccacgtcgtctggctcgccgtcgttgagggcgtagtagtaaccggcaacgccttgcatctccgggaactcgccgaccatttcggtggccaggtcgcacttggacagcaggcctgcacgtgcagcccaggcggaatcaccaccaatgcgtggtgcaatgtaggcggccagcttggaaacccgcacggccttgtcgtacacgctgccgagtttttcctggaacaccacgttctgcaggcgcaggttgaagtcttccagcttctgcttcttgtcttgcttgaagaagaactctgcgtcggtcaggcgcgggcgtacgactttctcgttaccagcgatgatctgctgggggtccttgctctcgatgttggccacggtgatgaagcgcggcagcaacttgccgtccacgtccagcaggcagaagtacttctggttgtcctgcatggtggtgatcagggcttcctgcggcacgtcgaggaaacgctcttcgaacgagcacaccagcggcaccggccattcaaccagcgcggtcacttcgtcgagcaggcttggcggcacgatggcagtgccttcctgcaagcgggccaattcctcagtgcgcttgctgatcagctcgcgacgttcgttggcatccgccagcacataggccgcgcgcaggtcgttgaggtagttggccggcgaagtgatgcgcacggcttctggatggtggaagcggtggccacgggaatcacggccggccttctgggcgaggatggtgcagtcgatgacctggtcaccgagcagcatcaccagccattgggtcggacgtacgaattcttccttgcgtgcaccccagcgcatgcgcttggggatcggcaggtcgttcagcgaatcttcaacgatggtcggcagcaggctggcggtcggcttgccggtgatgacctggctgaaccgcagtttcggcccgctctggtcgatctcactcagttccacgccacacttcttggcgaaacccagggcagcctgggtcgggttgccttcggcgtcgaacgcggcctggcgcggtgggccgtcaaggttgatgctgcggtccggctgctgggtttccagtgcggtcagcaacacggccaggcggcgtggcgcagcgtagacttttttcgcggcgaacttcaggccggcggtttgcaggcccttttcgataccggccatgaacgcatcggccagggtgttcagtgccttgggtggcagctcttcggtgcccagttcaaccaggaaatcttgagcactcattgtgcagcctccagcttagccaacacttcatcacgcaggtccggggttgccatcgggaagcccagcttggcgcgagccagcaggtaggcttgggcgacggaacgcgccagggtgcgtacacgcaggatgtattgctggcgcgcggttaccgagatggcacggcgcgcgtccagcaggttgaaggtatgggacgccttcaacaccatttcatagctcggcaacggcagcggctggtcgagttcgatcaggcgcttggcttcgctttcatagaagtcgaacagttcgaacagcttgtcgacgttggcgtgttcgaagttgtaggtggactgctccacttcgttctggtggaacacatcgccgtaggtgaccttgccgaacgggccgtcagcccacacaaggtcgtagaccgagtccacgccctgcaggtacatggccaggcgctctagaccgtaggtgatttcgccggtcaccgggtagcactcgataccaccggcctgctggaagtaagtgaactgcgtcacttccatgccgttgagccagacttcccagcccaggccccaggcacccagggtcggcgattcccagttgtcttcgacgaaacggatgtcgtggaccaatgggtccaggcccacatgcttgagcgagcccaggtagagttcctggaagttgtccgggttcggcttcaataccacctggaactggtagtagtgctgcagacggttcgggttttcgccgtagcggccgtcagtcgggcgacgactgggctgcacataagcggcgttccaggtttccgggccgatggcccgcaggaatgtagcggtgtggaaagtgccggcgcctacttccatatcgtagggctgaagtaccacacaaccttgctcggcccagtattgctggagggcgaggatcaagtcttggaaggtacgcacggctggcgtaggctggctcacgaaattcacctgttacttgggctgcgatttaaagagcgggagtatacccgattcggccccgccaccactccctggagccttatgccacgctgcttttggtgttctgaagatccgctgtacatggcttatcacgatcaggagtggggaacgccgctgcgcgatgcgcagggtttgttcgagttgcttttgctcgaagggttccaggcgggcctgtcctggatcaccgttttacgcaaacgcgagcattatcggaaggtcttgttcgggtttgatgcgcagcggttggcccaactgagcgacgccgagatcgatgcgctgatgctcgatccgggcatcgtgcgtaatcgcctgaaactcaatgccacccgacgcaatgccgcagcctggctggcgctggaggacccggtgggtttgctctggtccttcgtcggcggcaaacccaaggtcaatcacttcaaggaccgcagcgaagtcccggcgatcacggccgaggccgaagccatgagcaaagccttgaaaaaagccggtttcaccttcgtcgggccgaccatttgctacgccttcatgcaggcctcgggcatggtcatggaccacactcaggactgcgaccgttacgcggacttggtcaacgccggttagaatgcgcgctttgcgcaccacacacgatcaggagtgacctgtggaaaagtttaaaggcgccttgctggtaggcgctctgcggttgtttgcgctgctgccctggcgcgctgtccaggcggttggcacggccatcggctggatcatgtggaaaacccccaaccgctcccgcgacacggtgcggatcaacctctccaagtgcttcccggacatggatccggccgcccgtgaacggctggtcggccagagcctgatggacatcggcaagtccctgaccgaaagcgcctgcgcctggatctggccggcccagcgctccatcgacctggtgcgcgaagtcgaaggcctggaagtgctgcacgaagccctggcctcgggcaaaggcgtggtcggtatcaccagccacctgggtaactgggaagtgctcaaccatttctattgcagccagtgcaagccgatcattttctaccgcccacccaaactcaaggcggtggatgaactgctgcgcaagcagcgcgtgcaactgggcaaccgcgtggcggcttcgaccaaggaaggcatcctcagcgtgatcaaggaagtgcgcaaaggtggccaggtcggaatccctgccgacccggagccggccgaatccgccgggatcttcgtgccgttcttcgccacccaggcgctcaccagcaagttcgtgccgaacatgctcgccggccacaaggcggtgggcgtgttcctgcatgcgctgcggctgccggacggttcaggctacaaggtgattttggaagcggcgccggaagacatgtatagcaccgataccgccacgtcctgcgcggcgatgagcaaggtggtggaacgttacgtcggtgcctacccgagccagtatatgtggagcatgaagcgcttcaagaaacgcccaccgggtgaagagcgctggtactgattcaagatcaacgcaaaaccaatgtgggagggggcttgcccccgagagcggttgctcagtcaaataggtatcgactgacacactgccatcgggggcaagccccctcccacatttgaattgcgctcaggcttggcggtcgagttttttcaggaacacggtcatctctttctcggcctgcttatcgccgtgagcaagcgccgcttcgatgcccttctcccacgccagccgcgccgctgcacgatcttccagccccaactgcgccttgcccaacaacttccacgccgccgaatacttcgggtcgaactcgacgcacttgctaaaatgctccgccgccttggcgttgtccttcagatccagatagcccttgcccaaaccaaagcgcagcagtgagttatccacgcccttggcgagcattttttccagggattcgagcatgtcggccactccgttcgatcagaaaaaactcaaccccacgtggaacaacttctccacatcgcgaatatgtttcttgtccaccaggaacagaatcacatggtcacccgtggcgatcaccgtatcgtcatgggcgatgatcacctcttcgtcacggatgatcgcgccaatggtggtgcccggcggcaagccgatatcgcggatggccttgccgatcaccttgctcgacttcgagtcaccgtgggcaatcgcctcgatggcttccgccgcgccccggcgcagggagtgcacgctgacgatatcgccacggcgcacgtgggcgagcaaggtgccgatggtcgccagttgcgggctgatggcgatgtcaatatcgccgccctggatcaggtccacgtaggccgggttgttgatgatggtcatcaccttcttagcccccagccgcttggccagcagcgacgacatgatgttggcttcgtcatcgttggtcagcgccaggaagatgtcggcgtcggcgatgttttcttccatcagcaggtcgcggtccgaggcgctgccttgaagtacgacggtgctgtccagggtgtcggacaaatgccggcaacgtgccgggctcatctcgatgatcttcacctggtagcggctttcgatggcttcggccagacgctcgccgatctgcccgccgccggcgatgacgatgcgcttgtaggtctcatcgagacggcgcatttcgctcatgaccgcgcgaatattcgccttggcggcgatgaaaaacacttcgtcgtcggcctcgatcaccgtatcgccctggggcaggatcggccggtcacgccggaaaatcgccgcgacgcgggtttccacattcggcatgtgctcgcgcagctggcgcagttgctggcccaccagcgggccgccgtaataggcctttaccgcgaccagttgcgccttgccgccggcaaagtcgatcacttgcaaggcgcctggaatttcgatcaggcgcttgatgtagtgggtcactacctgttccgggctgatcagtacgtcgacgggaatcgcgtcgttgtcgaacagcccggcacgggtcaggtaggccgcttcgcgtacgcgggcgatcttggtcggggtgtggaacagggtgtgggcgacctggcaggcgaccatgttggtttcgtcgctgttggtcacggccaccagcatgtcggcgtcatccgcgccggcctggcgcagtacggtcgggaacgacgcgcggccttgcacggtacggatgtcgaggcggtcgccaaggttgcgcaggcgctcggcatcggtgtcgaccacggtgatgtcgttggcttcgctggccaaatgttcggccaacgtaccgccaacctgccctgccccaaggatgatgattttcatccggtcactcccttaaaaccattcagccgcgcgcggcggcgatcttgatcagtttggcgtagtagaagccatcgtgtccgccttcttgcgcgagcaactggcggccgtggggctgcttgatgccggccgtggtggcgaggtccagctcccgtgcaccgctggtgcgggcgaggaaggcttcgatcacctcggtgttttccgtcggcaaggtggagcaggtggcatagagcaggatgccgccgacttcgagggtcggccaaatcgcgtcgagcagctcgccctgcagcacggccagggcggcgatgtcatcggtttggcgggtgagcttgatgtccggatggcgacggatcacgccggtggcggagcacggtgcgtcgagcaggatgcgctggaacggtttgccatcccaccaggtggcggtgtcacggccatcggcggcgatcagctcggcgttgaggcccaggcgggcaaggttttcccgtacgcgcaccaggcgtttggcttcgaggtcgacagcgacgacaccggccaggtctttttcgacttccagtatgtgacaggtcttgccgcccggcgcgcagcaggcgtcgagtacgcgttggcccggcgccaggtcgagcaggtcggccgccagttgcgccgcctcatcctgcacgctgatccagccttcggcaaagcctggcaggctgcgcacatcggtggccgcttccagtacgatgccgtcgatgctgtatacgcacggtgtggcgttgaagccggcgtcggtgagcaatttcaggtaggcatcacggctgtggtggcggcggttgacccgcaggatcatcggtggatgcgcattgttcgccgcgcagatggcttcccactgttcgggccagaacgccttcagggatttttgcagccagcgcgggtgggcggtgcgcaccaccgggtcatgttccagctcggccagcagcgcttcgctttcgcgctgggcgcggcgcagcacagcgttgagcagggccttggcccacggctttttcagtttgtcggcgcaaccgactgtctcgcctatcgcggcgtgggcgggtacacgggtgtagagcaactgatagaggcccaccagcagcagcgcttccacatctgcatcggcggccttgaacggcttttgcagcaacttggctgccagtgcggacaagcgtggctgccagcgggcggtgccaaaggccaggtcctgggtgaaaccgcgatcgcggtcttcgaccttgtccagctgggtcggcaacgaactgttcagcgacgccttgccgttgaggacggcggcgagagccttggcggcggctagacgtgggttcattgggctgtcccgaggagggtgcctatagcaaatttctcacgacggctgttgaacaaatcgctgaaattaagcgctttgccaccgggtaattgcagacgggtcaggcacagcgcctgctcgccgcaggcgaccagcaggccgtccttgctggcgccgatgatctcgccgggagcgcctttgccctcgacgagtttagcggccaacactttcacggcttcgccattgagggtgctgtggcagaccggccaggggttgaaggcacgtaccaggcgctccagctccacggccgggcggctccagtcgacgcgcgcttcgtctttgttcagcttgtgggcgtaggtggccaggctgtcgtcttggacttcgcctgccagggtgccggcggccaggccggcgatggcctcgatcacggcgggcgggcccagctcggcgaggcggtcgtgcaggctgccgccggtgtcttcgccggtgatcggggtggtgaccttgagcagcatcgggccggtgtccaagcccgcctccatgagcatcacggtcacgccgctttcgctgtcgccggcttccaccgcgcgctggatcggcgccgcaccgcgccagcgtggcagcagcgaggcatggctgttgatgcagcccaggcgcgggatatccagcaccccttgcggcaggatcaagccgtaggccacgaccaccaacaggtccggcttcagcgccgccagttccgcctgggcgtcggcgttgcgcagggttggcggttgcagcacggggatgttgtgctccagcgccagttgcttgaccgggcttggcatcagtttttgcccgcgaccggccgggcgatccggctgggtgtacaccgcgacgatgtcataagggctggcaagcagggccttgaggtgttcggcggcaaattctggagtgccggcaaaaacaatgcgcagtggctcggtcatgggaggtctcggttaaaagcagtcacaaaagaaaaaggcttgccgcagcaagcctttggaagaagggcatcaagcttgctggcgatgctttttttccagcttcttcttgatccggtcgcgcttgagcgtggacaggtaatcgacaaacagcttgccgttgaggtggtcgcattcgtgctggatgcacaccgccagcaggccttcggcgatcagctcgaacggcttgccgtcacggtccagggccttgatcttcacgcgcagcgggcgctcgacgttctcgtagaactcgggcaccgacaggcagccttcctggtactcacccatctcgtcggtcagtggttcgaactctgggttgatgtacaccctcggttcgctgcgatcctccgacaggtccatgaccacgacgcgctgatgcacgttgacctgggtcgcggcgaggccgatgcccggggcttcatacattgtttcaaacatgtcatcgaccaactgacgaaccttgtcgtccactacggccaccggcttggcgatcgtgcgcaggcgcgagtcgggaaattcgaggatgtttaaaatagccataagcgtaattgctgcacatgtgaggtaaaggcaaatcggcgttgggatggacccagacagccggtgtgaaacgccccgaagccgcgaaggccctggcatttcacgcgaacgcacataataaaggagattcaccccatgaggaaatcgctactcgtcttgctgctgtgggccccgttcgccatggccctgctgccccagcccgtccagcgcctggatcaatcgacacaacaggccatccagcgctttttactgcacaaccgcattcttgattcgccacaggacctggacagcgcgccgtacattgttgccgctgatgcaggtcgagtgctgggggccaacggtgagcgggtgcatgccaggggcaacctggacccttcccaaccccattacggaatattccgacgcggcaaggcctacaccgatccgcagacccaagaactactgggcatcaacgccgacgatatcggcacggcccgtttcgtcacggctggcgacctcaccaccctggccgtgcagcgagtgacccaggaggtgcgcccgggtgaccgcctgctacgcgcgcaatctcctgtcgatccggccacccttgaggtcatttcagcggcacccttcatcgacgggcacatcatcgatgtccccaagggtgtcacccaaatcggcgtactcgatgctgtcatcctgaacaaaggccgccgtgacggcctggtcgaaggtcaactgctcagcgtgatcaaggctggcgcgaccgtgcgcgacagcctcaccggcacgccgacccgactccccgatgaacgcgccggcaccctgctggtatttcgcacctacgaaaagctcagttacggcctgatcctcaatgcctcgcgacccctggcagtgatggaccgtttcgagactgcgcatcaaacacaatgaataggttgctaaataagttaccaacagagttatccacagcttgttccggtcaaggatgatcaaatgaatccgataaacagtcatgaagtatccccgtcagaactggaagcccgactacgcttgcacaggctgccggaactgggccccaagcgttttcgcttattgatcgaagcgttcggctctgcgtcaaaggccatcagtgcccccgccagtgcctggcgttcgctggggttgccggccatcagcgccgatgcccggcgcagccatgaaatccgcgagggcgccagtgcggcattggcctggctggcttgcccagcccagcatttgctgatgtgggaccagccggagtaccccgcactgctcgcccagattgacgacgcaccgccgctgttattcgtcgctggtgaccctctgatcctggaaaaaccgcaactggcgatggtgggcagccgacgtgcatcccgtcctggcatggacaccgcagctgcgttttcccgtagcttggcgagcgcgggttttgtcatcaccagtggcctggccttgggtattgacggcgccgcccatcaagccgcattggacgtgggcggccagacaatcggcgtcctcggcaccgggctcgaaaatttttatccacagcgccaccgacggctggcggcggcgatgattgaccaaggcagcgcggtggtttccgagtttccgctggacgctccaccccaggccggcaacttccctaggcgtaaccgcatcatcagtggtctgtcccttggcgtattggtggtggaagccagcatggccagcggctcgctgatcaccgcaaaactggcggccgagcagggacgcgaggtgtacgcgattccgggctccatccatcatcccggcgccaagggttgccatcagttgatccgcgatggtgcggtgttggtggaaaccatcgagcacattcttgaaggcttgcgcggctggcaggcgctgtcccgtccggcgccgatgccggtgacccatccgctggtggcactgctgcatgcggcgccgcacaccagtgaagcgctggcgattgccagcgggcggccgttgtcccaggtgttggcgacgcttacggagctggagcttgagggccaggttatctgcgaaagcgggcgctggcttgcgcgctgctaggttttgtaacgaagatcggtaaactgcgcagagctttagtctggagagtgaataatggtcaaccggtggcgtgtgctggaaaccgcacgagaaattcgcgcaggcgcggtgattgcctacccaaccgaagcggtttggggcctgggctgcgacccgtggaacgaagaagcagtagaccgcttgctcgccatcaagaatcgctcggtggacaagggcctgatcctggtggcggacagcatccgtcagttcgactttctcttcgaagacttcccacaggattggatcgaccgcatggccgccacctggcccgggccgaatacctggctggtgccccatcaggacttgctgccggaatgggtgacgggtgtgcatgacacggtggcgctgcgggtgactgaccatccactggtgcgggacttgtgctcgctggtggggccgttgatttccacctcggccaaccctcagggtcgcccggctgcacgtacgcggatacgcgtggagcaatacttccgtggccaggtggacctggtgttgggcggcgccctgggtgggcgcaaaaaccccagcctgattcgtgacctggtgaccggcgaggttgtgcggccttcctgaaggaaggccacagggctgcttaaggcagcagaatggtcgaccccgtcgtgcggcgtgccgataactcggtctgcgccttggccgcttctgccagcgagtaccgctggttgatatcaatgcgcaccttgccgctcttgatcatcgagaacaggtcatcggccatcgcctgcaggttctgcgggttgttggcataggtcgccagggtcggccgggtgacatacagcgagcccttggctgacaggatccccaggttcaccccatccaccgcgcccgacgcattgccgaagctcaccaccaacccacggggcgccacgctgtccagcgaggtcagccaggtgtccttgccaacaccgtcatacaccaccggtacctttttgccgtcggtcaattccagcacacgctgtgcgacgttttccttgctgtagtcgatggtttcccaggcgccgagggatttggccagggcggccttttccggcgagctcaccgtaccgatcagcttcacgcccaaagccttggcccactggcacgccagggagcccacaccaccggctgcggcgtggaacaggatggtttcaccgcctttgagttcataggtctggcgcagcagatactgcacggtcaggcccttgagcatggcgccggcggcctgttcgaagctgatgtcgtccggcaggtgcaccaggttggcggcgggcaacacatgcagttggctgtaggcgcccagcgggccactgccgtaggccacgcggtcgccgaccttgaattgggtgacttcactgccgatggcatcgaccacaccggcgccttccgcgcccagccccgatggcaaggccggcggcgcgtacaggccgctgcggaaataggtgtcgatgaagttcaggccgatcgcctcgttgcgcacgcgaacctgttgtgggccaggctcggccggcgtgtagtccacatactcaagcacttcggggccgccatgggcgctgaactggatacgtttggccatctgcacttctccttaaggtcgaatcgcgtagccccctatcggactcctaagcttgatcttcgtcaactgcgacgtacgtgggtgcggtggtatcctgtgcgcccatttgccgccgacgcccaatggcctcgcgtagctttgcccgattcaaggtgatgccatgactacccgcaccgaggctgtaaaggcctacctgcttgacctgcaagaccgtatttgcagcgccctggaaaccttcgagacggacactcgctttatcgaagacgcctggacccggcctgccggcggcggcggtcgcacccgtgtgattgcaaacggttctgtcatcgaaaaaggcggcgttaacttttcccacgtctttggcagcggcctgccaccgtctgccagcgcgcatcggcctgagctggccggtcgcggtttcgaggccctgggtgtgtcgctggtgatccacccgcataaccctcatgtgccgacttcccacgccaacgtgcgctttttcatcgcagagaaagaaggcgaagagccggtgtggtggttcggcggtggcttcgacctcacgccttactacggcaacgaagaagactgcatccactggcaccgcgtggccgagcaggcctgcgcgccgttcggtcctgaggtgtattcgcgctacaaagcgtggtgcgacacttacttccacatcaagcaccgcaatgaaccgcgtggtatcggcggcctgtttttcgatgacctgaacgagtgggacttcgacacctgcttcgccttcatccgtgccatcggtgatgcctacatcgacgcctacctgccgatcgtgcagcgccgcaaggccattgcctacaccgagcaacagcgcgaattccaggaattccgccggggccgctacgttgaattcaacctggtctacgaccgtggcaccttgttcggcctgcaatcgggcgggcgtaccgagtcgatcctgatgtcgctgccgccgcaagtgcgctggagctacgactggaaggccgaggccggcagcgaagaagcacgcctcactgactacttcctgcaagaccgtgactggctgggccttgccgcgcccaaggcggttgtgtgatggaccgctatgtcgtgttcggcaaccccatcggccacagcaagtcgccgctgatccaccgcatgttcgccgagcagaccggcgagcaactggactacagcaccttgctggcgccgttggaggattttaccggctgtgcccgtgagttctttcggcagggccgtggcgccaacgtcacggtaccgttcaaagaggacgcctaccgactggccgacaccctcaccgaacgtgcccaacgcgccggcgcggtgaacaccttgagcaagctggcagacggcagcctgttgggcgacaacaccgatggcgccggcctggttcgcgaccttatcgtcaacgccgggttgagcctgcaaggcaaacgtatcctgctgctgggcgcgggtggcgcggtgcgtggcgcgttggaaccgttgctggctgagcaacccgcctcgctgatcatcgccaaccgcaccgtggaaaaggccgaactgctcgccgagctgttcgacgacctcggcccggtatccgccagcggtttcgactggctgcgtgagccggtggacgtgatcatcaacgccacgtccgccagcctgtcaggcgatgtaccgccgattgcgggcagcctgatcgagccaggcaagaccttttgctacgacatgatgtacgccaaggagccgaccgcgttctgccgttgggcgactgagcaaggtgcatccgtggcgatggatggcctgggcatgctggtggaacaggcggcggaagccttcttcctgtggcgcggcgtgcgcccggattcggcgcctgtattggctgaacttcgccgccagttgatctgacacggatccaaatgtgggagggggcttgccccctcccacattgttgatcgttttcagtcttggaactggatggggcaattgtcggccccttccagctttctcaactcttccaccacctgcggtctggcccggcgcagcgtcaaactgcgccctaacccacgcaagcgccgagcctcctggtgcagcatctccacccctgaatagtcgataaagttgatctgctgcgcctcgatcaccacgcgctcgccctgcagactttgcaggcgcacttgcaggtaatggctggccccgaaaaagatcgagccgcccacccgcagtacatcctcatcgccgtctcgccactgttgtacccgtggctgggaggtgcgcttgaggtagaaaaacagcgacgccagcaccccggcataaatcgccgtttgcagttccagcagcaaggtggccacacaggtcaggctcatcaccacaaactcggcgcgactgacgcgaaacaacgcccgaataccgcgacggtccaccagcccccaactgatcagcaggatgctcgcggccatgctcgggatcggaatgtgggcgatcagcgctgcgccaaataacgcgaacaatgccacccacaacgcggaaaacaccccggccaacggcgagcacgcgcccgcctcgtagctgaggccggagcgggtgaacgaaccggcggacaagtagccggagaaaaatccgcccgcgatattggatagaccctgcgcacggacttcctggttggcgtcgagcaattgctgtgagcgcgccgacaacgagcgggcaatcgacaggctggttaccaacccgagcatgcccaccgccacggcactcggcagcaggcgcaggagcaggtccaggtccatcggcagcgggctgaacggcggcagtttgccgacaaacgaactgaccagcgctacgtgcccgaacatcgccggccacagccacgccaccaggctgcccagtgccagcgcaatcaacagcgttggccagcgaggcaccaggtatttgagcagcgcgccgaccagcaacgtgccaagccctagcaggagggacgcatggtcccattcgccgctgtgatggatcagcgccaacaggctattgatggcggtggcctggcttggcagatccagccccaacaggttgggcaactggccgagggcgatcaccacggcggcgcccagggtgaagccgagcaccaccgagtgggagacaaagttcaccaacgcgccgaagcgcaacatgcccaacagccactggaaaacgccggcgaggaaggtcagcagcaggatcagggtgatgtagtcctgtgaccccggcacggccaatggactgacgctggcgtacagcacaatggaaatcgccgccgtgggcccgcagatcaagtgccaggacgagccccagaggcaagcgatcagtaccgggatgatcgcggcgtacaggccgtattcgggtgggagaccagcgatcagcgcgtaggcaattgactgtggcagggcgaggactgcgccgctgaggccgacgattgcatcccgaccgacgctggcgcgggtctggcgcgggagccaggcgaggaaggggaacagtgattggcggttgggccggggcatcgcagactcggtttagaggtttggcacagaatatcagtacacatcggttcctgtgggagggggcaagccccctcccacatttgaattgcatcaggcctcagagtctggctttaactgcagggagtgcgtctttgccgtccagtgtttttacaccctccagccacttatccaataccgccggattggccttgatccacgccttcgccgcatcggcattgctgactttgttgttggccacctcggccatgatgccgttctccatctcctgggtaaaactcaggttggtcagcagttttcctacgttcgggcaggcctgtgcgtaacccttgcgggtcaaggtatacacgctgccagtgtcaccaaagtatttctcgccacccttgaggtagcgcattttcaactgcacgttcatcgggtgtggggtccagccgaggaaggtgacgaatttctgtttcttcaccgctcgcgacacttcggccagcatcgcctgttcgctggactcgaccagcttccactggctcaggtcgaagtcgttcttcttgatgatttcctgcaacgagatattcgccggcgcgccggagccgatgccgtagatcttcttgtcgaacttgtcggcaaacttgttcaggtcggcaaaatcatgcaccccggcgtcccacacatagtccggcacggcgagggtgaactcggtgccgtcgaggtttttcgccaactgcaccacatcgccattggccacgaacttgtcgtagaagccctgctgcgccggcatccagttgccgaggaacacatccacctggccgtccttgagcccgccaaaggtgatcggcaccgccagggtgtccaccttcggtttgtagcccatgccggtcagcaggaaaccggtgatggcgttggtggctgcgatatcgctccagcccgggtcggccatttttaccgtttcacaactggcgtccgcgtacacgttggcgctggtcagtaccaacaggctcaacatcacagtcaacttttgcatggccttccctctgtatttattggttttggcagggttgtggaaaacgtgccttgcgctccaggtcgtcgaggtcgatatggttgcgcatgtattgctgactggcgtccaccagtggctggtgatcccagctcttcagcttgccctgggtgagtgcctcgaataccaggcgacgacggcgttggctggcgagcacctgttggtggatcgccgggatgtcccatttggcccgcgcctcagttaaaaacgcctcgaacagtggccggtgttccggtgactggctgaggttctcccgctcgtgcgggtcgttgtgcacatcgaacagtagacaagggtcgtcttcgctgtagatgaatttgtaggcgcctcggcgaatcatcatcagcgggctgatagtgccttcggccatgtattcgccgaacacttcgtcgtgcccgccctgcccttgcaagtgcggtaccagcgagcggccgtccagcggcaggcgtgggtcgagctcgccgccggccagttccaccagggtcggtagcaggtcggcggtggacacggcgtgggtcacgcggcccgccgcgaattgccccggcgcgctgatcaatagcggtacgcgggcggccatttcgaaccagtgcattttgtaccagagcccgcgctcgccgagcatgtcaccgtggtcgccagagaaaatgatgatggtgtcatcggccaagccggtgtcttccagggtctgcaggagcttgccgacattgctgtcgatgtagctgcacgcgccaaagtaggcacggcgcgcatcgcggatcttatccaccggcagcggcttgtcccacaggtcgtagaccttgagcaggcgctgggagtgggggtcgagatcgctttgcgcgggtgttgtaggcaacgggatatcagcgtcgtcgtacaggtcccagaacggcttgggaatggtgtacgggtcgtgcgggtgggtcatcgacaccgtcaggcagaacggttgttcgccgtcttcgcggatatggtcgaacaggtattgctgagccttgaagaccacctcttcgtcgaaatccagctggtttgtgcgcacgcacgggccggcttgcagcaccgacgacatattgtggtaccagctggggcgtacgtccggctcgtcccagttcaccgcccagccatagtcggcggggtagatatcgctggtcaggcgttcttcgtaaccgtgcagttggtcggggccgcagaagtgcatcttgcccgacagcgcggtgcggtagccgaggcggcgcaggtagtgggcgtaggtcggtacatcggcggggaaatcggcggcgttgtcgtaggcgccgatcttgctcggcaactggccgctgaccagggtgaagcgcgacggtgcgcacagcgggctgttgcagtacgcggcatcgaacaccacaccctgttcggcgaggcggctcaggttgggcaatttgatcggggaaggtccgtagaacggcagcatcggcgcggccatttgatcggccatgatgaaaagaatgttcttgcgcttcatgatctatcggcattccataggcggtgtttatgcgaatgagcatgcagcccatgaaaagtggggtaaagcccatgaaaagcaatgtctaggataagcaccgcttatgtatgaagcccttggcgacctgtccctcgatctgctgcgcgcgttcgaagcggcggcacgccaccgcagttttaccgccgctgcaatggaactgggcaccacccagcccgcgatcagccagcagatcaagcgcctggaagagcaactggcgatccgcctgtttgatcgcatctaccgtggcattgagttgaccgatgccggcgccctgttgttcgagcatgtgcagggcggtttgcagggcatcaaccagggactgagcctgatcagccagcaggatcagcatgaagtgctgcaagtagccaccgacttcgccttcgccgcctattggctgatgccgcgtttgcaccgcttccaccaggccaacccccaggtggacgtcagcctggtgaccagcgagcgcaaccacgcgaccttgcgcagcgatatcgacgtggcggtgctgtttggcgacggccgtttcaagcagggcgacagcctgtggctgttcaacgaggaagtgttcccggtgtgcagcccgcaatggctgaaggcgcaggccacgccgctgactgtacaaaatctgcatgattttccgctgctgcacctgcgccaggaaaacaacagccagtggttcgactggagcggcgtgtttcgcgaactgggcatcaccaccgcgcccacccccggccagttgcgcttcgataactacaccctgttgatccaggctgcgattgccggccagggcgtggccatcggctggcgccatctggtggacaacctgctggaacagaactggctgtgccggccggtgagcgacacggtgatctcacgtttcggctattacgtggtgcaaccccagcgcaaacgccgagggcagttggtggagcgtttcgtcgactggctggtggccgagcaggccagcagcgcacagtcactgaccgggctggccctgccgtcgattgcggtctagcatctggcgcatattggatccggagctcgtcatgcaacgtatcaagggctatcacgcccatatctacttcgacgcgaacactatcgaacaggcgcgcaccttgtgcgaagacgccgccaaactgttcccgctgcgcatgggccgtgtgcaccaacggccggtagggccgcacccggactggagctgccagttggcgttcgacccggaatacatcggtgtggtgctgccgtggctggtgatccatcgtaatggcctggtggtgttcctgcaccccgataccggcgatgacctgaaggaccacacggactatgccgtctggatgggggcgatgcgggagctgaacttgtcagccttttcttaaagttcatccctaaatatgggatagacatttatatattgagactttctgcttcgtaggtttatattcgctgcatccgctcagaactcaggtgaagcgatgcaggcgcaattgatcgcgctcgattggggaaccagctcccttcgtgcttataaactcggccccgctggcgcagtgctggaacagcgctcgctggcgtggggcatcatgcatttgcccaatgaaccccgggacattgctggcgtgcgttgcagcgatggcttcgagttggcgttcgatgcggcgtgtggtgactggctcgacgccgagcccggtttgccggtgattgcctgcggcatggttggcagcgcgcagggctggagcgaagcggcttatcgcaatacccctgtcgatgtcgccagcctcggccaggcgctgcataaggtgcgcagcctgcgtggcgtggacgtgcatatcgtgccgggcgtgatcgagcaggtcggcttgcccaacgtgatgcgcggcgaagaaacccaggtgctgggcgtgttgcaggggctgggcaccgacgcattgatcggcctgcccggcagccattccaagtgggtggaggtggtcgatggctgcatcacccacttcgacaccttcatgaccggcgagctgtttgcggtgttgagcaagcacagcatcctcggacgtacccagcaacaatccgcacaattccaggccgacgcctttgaccgaggcgtgcaggtggcgctgtccaaagacggccagcgcggcgtgctgtcgacgctgttcagtgcgcgcaccctgggcctcaccgccgaactcagccccgaacagcagcccgattacctctccggcttgctcatcggccacgaactcgccggcctgcccggcagtgcccgacacaagccgatcatcctggtcggcgccgggcccctctgcgcccgctatcaacgcgccctcgccctctgcggtttcgcccacgtcagcctggcgcaagaagccaccgagcgcgggctgtggcaattggcgatggcgtccgggctcactcaacctgtattggaggcctgacatgctcaagcacgcactcgcgcaaaacggtttgatcgccatcctgcgtggcattcgcccggacgaagccgaggccgtcggccaagtgctgtacgaggcagggtttcgggtgatcgaagtcccgctgaactcgcccgacccttacaccagcatccgcaccctgcgcgacagcctgcccgccgattgcctgatcggcgccggcacggtgttgctgcctgagcaggtcgagcaggtgaaggcggccggtggccaggtgatcgtgatgccccacagcgatgccaaggtgctgcgagcggcgaaagccgcaggcctgttcctgtcgccaggtgtggcgacaccgaccgaagccttcgccgcactggccgagggggctgatgtgttgaaactgttccccgccgagcaaatgggcccggcggtgatcaaagcgtggctggcagtcttgccggctggcaccttgctgctgccggtcggtggcattaccccggacaacatgcaggtgtttatcgatgccggtgccaaagggttcgggctgggttccgggttgttcaaaccgggtatgacagtggatcaggtagcgagccgtgcccaggcttatgtcgccgcctggaaagccctgagctgacatcaagttccgcgcccttggcgccgcatctataagagagacaagagatgaaaattaccaaactgacgacctttatcgtcccgccgcgctggtgcttcctcaaggtcgagaccgaccagggcgtgaccggctggggtgagcccgtggtcgaaggccgcgcccataccgtggcggctgccgtcgaagagctgtccgattacctgatcggcaaagacccgcgcaatatcgaagacatctggaccgtgctctatcgcggcggcttctatcgcggcggtgcggtgcacatgagcgccctcgccggtatcgaccaggcgctgtgggacatcaagggcaaggccctcggtgtgtctgtcagtgatctgctgggtggccaagtgcgcgacaagatccgcgtgtactcgtggatcggtggcgatcgcccggccgacaccgcccgcgccgccaaagaggccgtggcccgaggctttaccgcagtgaagatgaatggcaccgaagaactgcagttcgtcgacagcttcgagaaagttgacctggccctggccaacgtcgccgccgtgcgcgatgcggtcggcccgaacgtcggcatcggcgtcgacttccatggtcgggtgcacaagccgatggccaaggtgctgatgaaagagctggacccgtacaaactgatgttcatcgaagagccggtgctcagcgaaaactacgaggcgctcaaagagctcgcgccgctgaccagcacgccgattgccctgggcgagcgcctgttctcgcgctgggacttcaagcgtgtgctcagcgaaggctacgtggacatcatccagcccgatgcttcccacgcgggcggcatcaccgaaacccgcaagatcgccaacatggccgaggcctacgacgtggccctggccctgcactgcccgctgggcccgattgccctggcggcatgcctgcaactggatgcggtctgctacaacgcgtttatccaggagcagagcctgggcattcactacaacgagagcaacgacctgctcgactatgtgcgcgaccccggcgtgttcgactatgaccagggcttcgtgaagatccccaacgggccgggcctgggcatcgagatcaacgaagaatacgtgatcgagcgcgcggccatcggccaccgctggcgcaacccgatctggcggcatgccgacggcagcttcgccgagtggtaagcaccctgtaggagccgggatgccggctcctgcaagccctcaataaacataagaagaggcaacccccatgcaccctgaatccttcaccgggcaggcttctttagtcacgcctaccaaaaagcgttttttcatcatggtgctgttgttcatcaccgtggtgatcaattacctcgaccgcagcaacctgtcgattgccgccccggcgctgaccagcgaactgggcatcgacccggttcaggtcgggctgatcttctccgcgttcggctggacctacgcagccatgcagatccctggcggctggctggtggaccgcgtgccgccgcgcattctctatacggctgcgctgatcctgtggtccatcgccaccgtgatgctaggtttcgctgccagctttatcgcgttgttcgtgctacgcatggcggtgggtgccctggaagccccggcgtatccgatcaacagccgcgtggtgaccacctggtttcccgagcgcgaacgcgccacggcgattggcttctatacctccgggcagtttgtcgggctggcgttcctcacgccggtactggcctggctgcaacatgctttcggctggcacatggtgtttgtcgttaccggtggcgttggcatcctgtgggggatcatctggtacgcggtgtaccgcgagcccaaggacttcaaaggcgccaacgctgctgaaatcgagctgatccgcgaaggcggtggcctggtggacatgcaggaaaaagccgccaaggcaccgttcagttgggtcgacctggggatcgtgctgagcaagcgcaaactctggggcatctacctggggcagttctgcctgaactccacgctgtggttcttcctgacgtggtttcccacctacctggtgaaatatcgcggcatggacttcatcaaatccggcctgctggcatcgttgccgttcctcgcggcgtttgtcggcgtgctgtgttccgggatcttttccgattggctgattcgtcgcggcgcatcggtggggtttgcgcgcaagttgccgatcattggcgggttgctgatctccacggcgatcatcggtgccaactatgtggactcgacggcctgggtgattgcgttcctggcggtggcgttctttggcaatggcctggcgtcgattacctggtcgctggtgtcgaccctggcaccggcccgcctgttggggctgaccggtggggtgttcaacttcatcggcaacctgtcggcgattgccacgccgattgtgatcggctttttggccagtggcgattcgtttgcgccagcgattacctacatcgcggtgctggccttgctcggagcgctctcttacgtgttgctggtgggtaaggtcgagcggatcgagttgtaaaaaagggcgaccttgcggtcgccctttttcctttcggctcagggcaccgacatctcgttacggaacacattcagcgggtcccagcgctgcttggtgcggcgcaggcggctttcaatcatgaggtcagggaagaacaccttgtaccactgcgggttgggccccttgttggggtcgccgtcgataaacagcatgtcgcggtcggggtaattgatgtagcacccttcgaactgggcattgaccggaacgccgttgtcgttggcaaatgccgcgaaaaacagtccctggatccattgcgcgtgggcttgatccgaagcgctgctttcgtcacgccagtagcattgtggttgccacttcaagtaggacgaacgctgtgcaaccgatgattcccgtcgcacggcggcgctggcctgattgatttgcccaccgaatgactggatctggatcaggctttgagtcagccgcttatcggggtcgtcccacgtcagcgtgtcccagatcgcctgcagcacagtgggggtgaaaatacccttctggtaggccgacttgtaccgaccacgctggtttggccctgagccattgagcgtctgctggcaatgcagccaatccattcgacgcgtcgcggccagggcagacgccagtgaattgatcgtcggccctggcgggttgctgcgtggcaggtgggtcgttggggaaggactcaggcattcggtagcggaaatgccgatggcattgagcatcgagctgacaaagtcctcaaagggggcttgatcattcaactcgccctgcttgtccacgtaatgaacatccatcgtgacgttgccagtgttctgatggcgcatctccagtttggttgccaggccccaggtgtccgggtttgcctggttgcgggcaaaccagtcctgataggccaccagcaatctgtcgagggctggcttggtcagcagcgaccagtcccactccagcaccagccacagcacttccttgggggcttggggcaaacgttcgaagtagtagctggtaataatcccgaactgcccgccgcctgcgccgcagcaggcggcgaacagatccagttcgtcctgttgggcgctgttgcgggcgacatgtacagggaccaggccgttgccttgggcgttcggcaccagcatgtcgacgccactcaaccaatcgcacaccaggccatccttgcgcgacagcagcccgtagccaccgccgcaaatatgcccacccagcccgaccgaatagcacgagccgccgggcaagctcgtgttggccagcttgtacagcgccacataggcatcccagttctggccgcccgcctccaggcgatagctgtagcgatgaggcgaggtgggcaccaactccgaggcaatctgccccgtggcgtcgtagaccacttggttgagttggctgatatccaggatcgagagcacttcgtcgggactgtcgggcatcttgttcgcgacaaagccttcatagcagtgaccgccgctacgcaccgtgatccggccattggggatcgccagcgcctgggcggcggcgtcgatgatgtcctgggggctatagcagaggtaaatcaagttggcgccacttgacgaagattcaccctgcacattgcccaatggccagcgcaggttgaaacctttttgcagtgttgaatgacgacggtccgcagcggtaaggagatcaaatgccatgatgtactccaaagagccaagaatgacttctgatgcggctaacttaacgaccgggagggcaaggaatgcggggcttgcgcaggcggttagacggcaataggcatgaagtgcgttgagggaggacgcaatgtccaccctcaagcctagcggaaaaaggtgaaggcgccggggggttagttgagtacgccgtcgaggatctcgtagacgatgcccgtgcccaccgcgatcagcaccacatccggccccgaacggcgccactcataacccgggtacaccggcaggcgcgcgagggcgcggttgtctaggcgttcgccgtagtaaccacggggcaacggctggccacgtaccaggcgtacattgggcggcggcggtgcgccacgggagaactggccgtggttgtcatggatgatctggcgtaccgggccgaagtcctggggcgggccgccgcgacggttgtcctgcgggccgcgatggtcgtcgccatgttgctcgtgctggccttgcgggccgccacggtcggggccgccttggtcataaggcgcggcttgcaccagcgcgctggcgccaagcaccagtacgccaaggcctgcaatcacggatttgggcattttcatcgggtattcctcagggcacgcaaacaaaaaagggacttcgaacgaggttcgaaatcccttggtcttgctgtttaggccgtgcccgcgcgggttgattcctctgtatcaggaactttacctactgcttacggggcccttacttacgggcgttacgcacgccttccgacaatgccgcacacaggctcaacacgccgtcgatggcttgctggtcattcttggcattggcaatgtgatcgatcagcgccgaacccaccaccacaccgtcggccaggcgggcgatggccgccgcttgttccggtgtacggataccaaaaccgatgctgatcggcaggtcggtgtggcgacgcaggcgggtcacggcttcttcgacgtgttccagggtcgccgcgccggcaccggtcacgccggcgaccgacacgtagtacacgaagccggagctgccgttgagcacagtgggcaggcgcacatcgtcggtggtcggggtggtcaggcggataaagtcgatgcctgcggcctgggccgggtcgcacagctcgccgttatgctcgggcggcatgtcgaccacgatcaggccgtccaccccggcttccttggcgtcggcgatgaactgcggcacgccgtatttgtggatcgggttgaagtagcccatcaacaccagcggcgtgtcgttgttgtccttacggaactcgcggaccatctgcagggttttcaccaggttctgcttggcattcaacgcacggatgttggccagctgaatggccgggccgtccgccatcggatcggtgaagggcatgcccaactcgatcacatcggcaccggcggctggcaggcccttgaggatctccagggaggtgtcatagccagggtcgccagcggtgacgaaggtcaccagggcggcgcggttttgttctttcaactgagcgaagcgggtgtgcaggcggctcatcagtgtttctcctgctgggactgttccatatggtgcatgacggtctgcatgtctttgtcgccacggcccgacagattcaccaccatcagatgatccttcggcagggtcggggcgcgcttgaacacttcggccagggcgtgggcgctttccagggctggaatgatcccttccaggcggcagcatttgtggaaggcgtcgagggcttcgtcatcggtcaccgaggtgtactggacgcggccgatgtcatgcaaccaggcgtgttccgggccgatgccggggtaatccaggccggcagaaatcgagtgggcgtcgatgatctggccatcgtcgtcctgcagcaggaaagtgcggttgccgtgcagtacgcccggtacgccaccgttgaggctggcagcgtgcttgccggtctcgatgccgtggccggccgcttcaacgccgatgatctccacgctggtgtcatccaggaacgggtggaacaggcccatggcgttggagccaccgccgatgcatgccaccaggctgtccggcaggcggccttcctgggcttgcagttggtcgcgggtttccttgccgatcacggcctggaagtcgcgcaccatggctgggtacgggtgcgggccggccacggtgccgatcaggtagaaggtgctgtcgacgttggtcacccagtcacgcagggcttcgttcatcgcgtccttgagggtgccggtgccggcgaccactgggatcacttcggcgcccagcagcttcatgcggaacacattggcctgttggcgctcgatgtcggtggtgcccatgtagatcacgcattgcaggccgaagcgcgcggccacggtggcggtcgccacgccgtgcatgccggcgccggtttcggcgatgatgcgttttttgcccatgcgccgcgccaacaggatctggccgatgcagttgttgatcttgtgtgcgccggtgtggttcagctcttcgcgcttgaggtagatcttggcgccgccacagaactcggtcaggcgctcggcgaaatacagcgggctcggacgaccgacgtaatcgcgctggaagtaggccaattcctcgttgaacgccggatcgatcttggccgcttcatattcgcgggccaggtcgaggatcaacggcatcagggtttcagcgacgtaacggccgccgaacgcgccgaacaggccgttggcgtctgggccgttgcgtagatcggtctgggactgagtcatgggacactccaggagagaatgggtgtgggaagcaatgacggccactctacccctgacgtcctgcgctgaaaaccgataagatcgccgcaacctgtcaggaaaactcacagatgagccgagaccttccacccctcaatgccttgcgtgcctttgaagccaccgcccgcctgaacagcgtcagccaggcagccgagcaattgcatgtgacccacggcgcggttagccggcagttgaaggtgctggaggaacacttgggcgtgagtttgttcgtcaaggaagggcgcggccttaaactcacagatgcgggcgctcgtttgcgcgacgccagcgccgaggcgttcgagaggttgcgggatgtgtgcgccgaactcacccagagcggtgccgacgcaccgttcgtgctgggttgctcgggcagcttgctggcgcgctggctgatcccgcgtctgggtcgtttgaacgcggacttgcccgacctgcgcctgcacctgtcggcgggtgacggtgaccttgacccccggcgccccggcctggatgccttgctggtgttcgccgagccgccctggcctgcggatatgcaggtgtatgaactggccagcgaacgcatcggcccggtgatgagcccgcgtttcgctggctacgagcggctgcgccaggcgcccgcgtcggcgttgtgtggcgaagcgctgttgcacaccacctcacgtccgcaagcctggcccagttgggcgcggcaacacggcatcgaacccggcgcgttgaaacacggccaggggtttgagcatttgtattatttgctggaggcggcagtggccgggctgggcattgcgattgcgccggaaccgctggtggtcgaagacgtgcgcgcgggtcgcctggtggcgccatggggtttcagtgaaaccccggcgcacctggcgttgtggctacccaagcgcgccgcggacgggcgcgccgggcggttggcgcagtggctcaaggcagagctgttgcgccagccggtttagtcaccgcgcttgcacagcaggtaggcggccagcaggcccagtgcgcctacggcaacaccggctgtagtccatgggtgctcttgggcgtagtcccgggtagcaacaccggtttcgcggattttgactttgctttcttcgtaggcatcgctgatcaggtggcgggaatgcttgagggcattctcggcattgcttttcagggccttcaaggttttgcgcgattcgtcagacgcatcgtccttgaggctttccagagacttgagcaggctcgaaatctcggcttccatgctttccagcgacgctttgcgtaaagaagtgttggccatgtggactctcctgaagtgattgagtggcgtgtgtagataccgactgcggccgtttcagaaagtgcagttaatctgaactttcaggtaggaatggtcgccagaagcagtacgaacattgactgctacgcttgcttaacgacccttaggagaactgccatgagtgatcatcacacctacaagaaagtcgaattggtcggctcgtcgaccaccagcatcgaagacgcgatcaacaatgctatcgctgaagccaacaagagcatcaagcatctggagtggtttgaagtgactgaaacacgcggccatatcgagaatggcaaggtcgcgcactatcaggtcaccctcaaggtagggttccgaattgccagtagttgatcgcaacggttgaacttgctgactggccgattgccataacctgcgctacaaccaatgggtgccgatgccgcaagcgtcggcacgctctttttgatcagcgcaaggaaagtaacggatgaagaagttcctgttagcggtaggtttgttgagcattgccggcacagccctggcggcgggcaagccttgtgaagagctgaaaagcgagattgcggcgaaaatcgacgccaggggcgcttcgggctattcgttggaagtggtggataaaggcgcttctaccgacgctaaagtggtcggcagctgcgaaggcggcaccaaggaaattgtctacaagcgcggttaatcccgtgttccagacataaaaaaccgacgcgagtgcgtcggttttttttcgcttgagggtttcagcccttcatcaactgcgccagcaactcgtaggaatgaatccggtcggcgtgctcgtacaggtcgcaggtaaagatcagctcatcggcgccggtttgttcgatcagcacctccagcttggcacggatcttcgccgggctgccgaccatggccaggccgaggaagctgccgaccgcgtctttttcatggggcagccacaggccatccatggttttcaccggtgggcgctgcaccaggctttgcccgcgcatcagggcgaggatgcgttggtagaccgaggtggcgaggtagtcggcttgttcgtctgtgtctgcggcgaccagcggaataccgagcatcacgtagggtttgtccagcacggccgaaggcttgaagtgattgcggtatacgcgaatcgcctcatgcatcaggcgcggtgcgaaatgcgaggcgaaggcgtagggcaaaccgcgttcgcccgccaattgcgcgctgaacaggctggagcccagcagccacaccggtacgttggtgccggtaccggggacggcgatcacccgttggtcgggggtgcgtgggccgaggtaggccatcagctccgccacatcttcggggaaatcgtcggcactgcccgagcgctcacggcgcagggcgcgggcggtcatctggtcggagccgggcgcgcggcccaggcccaggtcgattcggccggggtagaggctttccagggtgccgaactgttcggcgatcaccagtggcgcatggttgggcagcatcacgccgccggagccgacgcgaatcgtcgaggtgccgccggccaggtaacccagcagcaccgaggtggccgaactggcgataccgtccatgttgtggtgttcagccacccagaaacggttgtagccgaacttttccacgtgttgggccaggtccagggaattgcgcagcgactgcgccggactgccgttggcgcgcacgggcaccaggtcgagggtcgagaactttacgtcggacagcgatttcataagcctgcttctccaaaagggccgcaggctttttagacgaaccaaaacctgccgcttcatgtgcatgctctatgcaatgagggcatatacccgagattcaatagcagcccaggaaatttcctactgaatcgctaggtttctcttacaagatgaactttgccgggccgactatcctcagaacccttactgacgcaaaaccaccgttcgaggagaccgctatgagtatcgttaaaaaagcatccgcgcattgggaaggtgacctgaagactggcctgggctccatttccacggaaaccggcgtgctgcgtgaagcgccttacggcttcaaggcccgtttcgagggcggtaagggcaccaacccggaagaattgatcggtgcggcccacgccggctgtttctccatggcgttttccatgattctcggcgatgccgggctcaaggctgacagcattgacacccaggccgaagtgaccctagaccaggttgacggtggttttgcgatcaccgctgtgcacctggtgctcaaggccaagattccgggcgcgagccaggcgcagttcgatgaactgagcaaaaaagccaaggaagggtgcccggtgtccaaagtgctgaacgcgaaaatcagcctggatgccaccctggtcagctaacgcagcaggtccaatgtgggaggggcggtgcgacgattcgacttgcccccgatnnnnnnnnnnnnnnnnnnnnnnnnnnnnnnnnnnnnnnnnnatcgggggcaagtcgaatcgtcgcaccgcccctcccacatttagttctgcgttagatcagaactcgtgttttgtcagtgtggtcctattaccatgcagcctaggcgcacactcgtgcgcagcgcattcagggagcttcacacatgaaacgttttgccttggcaatcatctgcggtgtattggccacgtcggctgtggccgcgccaaaagactgcgaagagctcaggaaggagattgaggtcaagatccaggctaacgcggtgccgtcctacaccctggagatcgtcagcaaggaagaagccgacaagcacgacagcgccatggtggtcggcagctgtgagaacggcaccaaggccatcgtctaccagaagaacaacgactgatcagatgcagttgacgctgcgttcttctgcgagcaactgacgcgccgagtcatacaaccggatgttgggtgtgaaggccagcgagcgcccttccagcacatagcgctggccggcctggaagtggtcgtattccagggtcatgaagcaggtgcggtacatcatctggctgagcccacccaaaccgccgccggcggggacttcaaagtcgaaacgcaccatcagttcatgatggccgggcggcatttggaagaaacgtccgtcatccaggttcttgccgtccaagcgttgcgccattaccagcttggaccccggcgtcggcgtggtgaaatcaacccacgcctgctgcgggtctgccggtggcaccggggtggtggtgcaggcactgaggaacagggcggcgacgggaaaccagagctgacgcatggcaggcactcacgtaggaaagagttcagcctgatgccagcggcgacagacttcttgtaagtataaacacgtcgtgccatggaaaaattccgcctgggcgcgatagtctggcgagcaaattacccaggagcggtcggggcatggtcaggcgttttcttccagggttgatggttgtgctgctcagcggctgttccagtgtcagttattacggtcagttggccagtggtcaatggcaattgctgcgcgcccgggagccggtggcgcaggtgatcgctgacccttcccgcccagtgctgttgcgcgagcatctggcgcaatcgcaaaaggcgcgtacgttcgccagtgaacacctgcatctgcctgacaaccagagctacaggttgtatgccgacatcggccggccttatgtggtctggaatgtcttcgccacgcaggagttttccctgtctcccgaaacccattgcttccctatcgcgggctgtgtggcctatcgcggctactacaaccagggcgcggcgcgtggtgaggcggcgttgttgaagcagcgaggcatggacgtgtcgatcggcggtgtcgaggcctattcaaccttgggctggttcaacgacccgatcatgaattcgatgatgaactggggtgatgagcggctggccacgttgatcttccatgagctggcgcaccagcgtttctatgtgaaggacgacaccgagttcaatgagtcgtttgccaatttcgtcgagcaggaaggcacgcgccagtggcgtgctgcacggggcttggcgccgcagagcctgtcggcgtcgaagcagcgtgatgagttcattcagctgatcctcgatacccgccagcgcttggaaaaactctatgcccaacccttggcaactgatgtgatgcgccaggcgaagtcggccgagttcgagcgtctgcgtcgcgattaccggcagctgcgcgacagccagtggggcggggacaaacggtatgacgcgtggatcaaccaacccatgaacaatgcgcggttgctaccgtttgggctgtacgaccagtgggtgccggcgtttgcggcgttgtttgcgcgggaaggtggggattgggtgaggttttataaggcggtggagaagctgggtgggttgccggtggtgcagcgcaaggcggcgttgaggcagttggaaaggggtgctctttagggcctcatcgggggcaagtcgagtcgtcgcaccgcccctcacacattttgaccgtgtgcgccggtcaattgtgggagggggcttgcccccgatggcggtctcaaagtcgctgcaaaaacgcctgatgcatctgatccagcgtttcaaaatgccaggtcggcgcctcggcattcagttcctcgaaactaccaaacccataccccaccgccgccgaatccagcccattcttgtgcgcgccgatcaggtcatgcttgcgatcaccgatcatcaaggtggtggccgggtccaggccttcctcgctcatcaggtgggcaatcagttcgactttgttggtgcgcgtcccgtccagctcgctgccgtagatcaccttgaagtgcttggcgaaatcgaagtgccgggcgatttcgcgggcgaagacccagggcttggaagtggcgacatagagctggcggccttgaccgttcaacgcttccagcagcggcatcacgccgtcgaacacacggttctcataaagcccggtgaccttgaaacgctcgcgatagaaattcaccgcttcccaggccttggcctcgtcgaagccgtagaactgcatgaacgcttgcagcaagggcgggccgatgaagtgttcgagtttggtcaggtccggctcgtcgatccccagcttgccgagggcgtactggatcgagcgggtgatgccctcgcgtgggtcggtgagcgtgccgtccaggtcgaacaggacggtttggtaaggcagggtcatcggtcgaatccttcagccaggtgcaggtctttgagcttcacgtagttcgcggcgctgtaggtgaaaaaggcgcgttccttgtcagtcaatgggcgaatctgtttgaccgggctaccgacatacaggaagccgctttcgagtttcttgcccggcggcaccaggctgccggcgccgatgatcacgtcgtcctcgaccacggcgccgtccatcacgatgctgcccatgccgatcaggatgcggctgccgactgtgcagccatgcagcatgaccttgtgggcgacggtcacgtcgtcgccgatcagcagcgggaaaccgtccgggttgaacggcccggcatgagtgatatgcagcacgcagccatcctgcacgctggtacgcgcaccgatgcggatgcggtgcatgtcgccacggatcacggtcagtggccagaccgagctgtcggcgccgatttcgacatcgccgatcaccaccgccgaaatatcgacaaaagccccggcgcccagggctggcgtgtggttctgataggtgcgaagggtcacgatagcctctctctcttctgctgatagctgcggtgggcgttgattgtaattaagatggccccatctttgttcttacatgtttcttcagccaaggtgcccaccgtgagcgcgaacaaccctcttctgcagtcctacgacctgccgccgttctcggcgatccgtgccgagcacgtccagccggccatcgaacagatcctcgccgacaaccgcgttgccatcgaaggcatcctgcaaagccagggcaaaaatccgacatgggccggtctggtcctggcgatggacgaactgaatgaccgcctgggcgccgcctggagcccggtcagccacctcaacgccgtgtgcaacagcgctgaactgcgtgaagcctacgaaagctgcctgccggcattgagcgcgtactctaccgagatgggccagaaccgcgcactgttccaggcctttgaagccttggccaatagcccggaagccgccggtttcgacgtggcgcaaaaaaccatcctggaacactccctgcgtgacttccgcctgtccggcatcgatctgccgccagagcagcaaaaacgctacgccgaagtgcagagcaagctgtcggagctgggcagcaagttctccaaccagttgctggacgcgacccaggcctggaccaaacacgtcaccgatgaagccaccctcgcgggcctgaccgactcggccaaggcgcagatggccgccgccgcccaggccaaaggcctcgacggctggctgatcaccctggaattccctagctactacgccgtcatgacctacgcccaggatcgcgcgctgcgtgaagaagtctacgcagcctactgcacccgtgcgtcggaccaaggcccgaatgccagtcagaacgataacggcgcggtgatggaacagatcctcgacttgcgccaagagctggctcagttgctgggttacgcgtcgttctccgaactgagcctggccaccaagatggccgagtccagcgaccaagtgctgagcttcctgcgtgacctggccaagcgcagcaagccgttcgccgcccaggacctgcaacagctcaaggcctatgctgccgaacaaggctgcgccgacctgcaaagctgggacagcggtttctacggcgaaaaactccgcgagcagcgctacagcgtgtcccaggaagccctgcgcgcttacttcccgatcgacaaagtgctgggcggcctgttcgccatcgtgcagcgcctgtacggcatcgagatcgccgagcagaaaggcttcgacacttggcacccggatgtgcgcctgtttgaaatcaaggaaaacggccagcacgtgggccgcttcttctttgacctgtatgcccgtgccaacaagcgcggcggtgcctggatggacggtgcccgcgaccgtcgccgcacaatcgacggcgccctgcaaagcccggtggccaacctggtgtgcaacttcaccccggccgacagcggcaagcctgccctgctgacccacgacgaagtcactacgctgttccacgaattcggccacggcctgcatcacctgttgacccgtgttgaacacgctggcgtgtctggcatcaacggcgtggcctgggatgcggtggaactgccgagccagttcatggagaactggtgctgggagccggaaggcctggcactgatatctggtcactatgaaaccggcgagccgctgccccaggacctgctggaaaaaatgctcgcagcgaaaaacttccagtccggcctgatgatggtgcgccagctggaattctcgctgttcgacttcgaactgcatgccacccacggtgatggccgcagcgtggcgcaggtgctggaaggcgtgcgcgatgaggtatcggtaatgcgtccgccggcctacaaccgcttccccaacagctttgcgcacatctttgccggcggttatgcggcgggttactacagctacaagtgggccgaagtgctctcggcggatgccttctccaagttcgaagaagacggcgtactcaacgccgaaaccggtcgtgctttccgcgaggcgatcctggcgcgtggtggctcccaggagccgatggtgctgttcgtcgacttccgcggacgtgcgccgtcgattgacgcactcttgcgccacagcggcctgagtgaggacgcggcagcatgagtgaagggcctgtgattaccaaaaagcagtttatcgccggggcggtctgcccggcgtgcagtgagccggacaaactgaagatgtggaccgaggacagcgtgccgcaccgtgagtgtgtggcctgcggttataccgacacgctgaatgatcaagggttgtcggtgcccaaggaattgggcacgcgggtcaataccacggcgttgaaagcgccggcggacccgaaggtgcaggcggtgcagtttttccccaatcccaagctgaaaaaggactgatacccgcttagggtgtcagcaccaattcagcgtctttcttgggttcgacacggctgctgccggccgtgttgagccagcttttcattgagcacagcgcgaattcactggtgctgcagtcgccatttgccaaggcggtgcgcaacttgtcgatatcagccttcatcatgtagcgaaccccgtccttgaagccgttgctggtgccaaacccgcccagggtcatttcgttcagcgcgtcttccttgctccacccctgaatcaccactcgatacatcgcggccatcaggccggtgcgatcagagccatgcttgcaatgcatcagcaccgggccgttggcttcggcgtcctggatggccctgagtgccgccagtacgtcggaatcgtcgacatggttagtgcgataagtcagctgtacccgtttgatatcagatgacttcaaccaggcggcatcagattccggcaaaaagttgatcactgtaccgatcttgagtttttccaactcaggcacggcgctgctatcgggcaaagcgctgcgatagagcgttggcgtcatttggtgcaggttgaattggttgcccactggctgggcccactcgggtgagcgaatggacgaagtctcatcggcctgggcgtgaacggcgccgagcagtgccatgaatgccaggccgagagcaggcagcaatcgagtgttggacatgcgctttgtgacccaatagggaaatggctgatggagcgcagattcgcccagggggggtcaacaccgtgtgaggtgctcgtcaaagaaacgtgaatggcctcatctgatccggtgtttttaccgctcaagcgattcgtcctgatgcttaggctgctatcatttgtaactattgtttgccggtgcctgatatcccactggcttgccacacatcacgctgctcccagaagtggcggataaacccgtgaccacatgatgaggtgccaccatgtctgatcaagatcaagacaacccccggcgtgactttttgcgcaaatccttgaccttgatcccgatggtcacggttgccagcaccggccttggcggctcgatgctgatggcaacgcctgaaccggcgcaggccgctcccgccaagcctgcgccgagtgaaaaggcctacgagcctacttacttcacggctgaggaatgggcgtttatcaacgccgccgtcgagcgcttgatccccgccgatgaccaaggcccgggtgccctggaagccggggcgccggaatacatcgaccgtcagatgaacaccccgtacgccagcggtgccctgtggtttatgcaaggcccgttcaacgcggatgctgctccagagatgggctggcagtccaaactggtacccaaggacatctatcgcctgggcattgccgcgacggatgcctggtcgaaagccttcaacggtaaaacttttgctgcgcaagacagcgctacccgagacgacatgttgcgtcgtctggaggctggcggaagtgaagtgacggcgcattttgacgcggtgccgccgaagatgttcttcaacctgttgctgcaaaacaccaaggaagggttcttttgcgaccccatccacggtggtaacaaaggcatggtcggctggaccatgatcggcttccccggcgctcgcgccgatttcatggactgggttgaacgcaacgagcaataccccttcccggcagtttccatccgtggcgagagggcttgaacgtggcgaccatcatgaagaaagtggatgcggtgatcgtcggcttcggctggaccggcgcgatcatggccaaggaactgaccgaagcaggcctcaacgtggttgcgctggagcgtggcccgatgcaggacacctacccggacggcaactatccccaggtcatcgacgaactgacctacagcgtgcgtaaaaaactcttccaggatatttccaaagagaccgtgaccattcgccatagcgtgaaggacgtcgccttgcccaaccgtcagttgggcgcgttcttgccgggcaacggcgtgggcggtgcgggcctgcattggtcgggcgtgcatttccgtgtcgacccgatcgagctgcgtatgcgcagccactatgaggagcgctacggcaaacacttcatccccaaggacatgaccatccaggacttcggcgtaagctatgaagagctggagccgtttttcgactacgcggaaaaagtcttcggcacctccggtcaggcctggaccgtgaatggtcggttggtaggcgaaggccgtggcggcaacccgtatgcaccggaccgttccaatccgtttccgttggaagcgcagaagaataccgtctccgcacaactgtttcagaaagcggctgccgaggtgggttacaaaccctacaacctgccgtccgccaatacctcggggccgtataccaatccttacggtgcgcagatggggccgtgcaacttctgcggtttctgtagcggctatgtctgctacatgtattccaaggcctcgccgaacgtgaacatcctgccggcgctgcgccaggtaccgaactttgagctgcggcccaattcccacgtgctcaaggtcaatctcgacagcaccaagagcaaggccactggcgtgacttacatcgacgcccaaggccgggaatgtgagcagccggcggacctggtgatccttggcgcgttccagttccaaaacgtgcgtttgatgctgttgtcgggtatcggcaagccctatgacccgataaccaatgagggcgtggtgggcaggaacttcgcctaccagaacatggccaccatcaaggccttcttcgacaaagatacccataccaacaacttcatcggtgcaggcggcaatggcgtggccatcgatgacttcaacgccgacaacttcgaccacggcccccatggcttcgtgggcggttcgccgatgtgggtcaaccaggctggcagccggccgattgccggcacgtctaaacctccgggcactccggcctggggtagcgcgtggaagcgcgccacggccgattactacacccaccaggtgtcgatggatgcccacggcgcccatcaatcctaccggggcaactatctggatctggacccggtgtaccgcgatgcctacggcctgccgctgctgcggatgacgttcgactggcaggaaaacgacatcaagatgaaccgcttcatggtcgagaaaatgagcaaggtcgccgaggcgatgaaccccaaggcgattgccctgctcggcaaaaaggtcggtgagcatttcaacacggcgtcctaccagaccacccacctcaacggcggcgcgatcatgggcaccgacccgaaaaccagcgcgttgaaccgctatttgcagtgctgggatgtgcacaacgtgtttgttcctggcgcgtccgctttcccacaaggcctgggctacaaccctaccggcctggtggcggcgctgacctactggtcggcgcgggccattcgcgagcagtacctgaaaaaccccggcccactggttcaggcataaggagcgatgaccatgaaagcacttgttatcgccaccttcgcccttttcagcagctgctctgtcagtgccgctgaaagcgatttgatcaagcagggtgaatacctggcccgcgccggtgactgcgtggcctgccacaccgccaaaggcggcaaacccttcgccggcggcctgccaatggaaacgccgattggcgtgatctattccaccaacatcaccccggacaagaccggcctgggcgactacagcttcgaggacttcgacaaggccgtgcgccatggcgtcgccaagagcggtagtacgctttacccggcaatgccctacccgtcttacgcgcgcgtcagcgacagcgacatgcaggcgttgtatgcgtatttcatgaagggggtcgagccggttgctcagcagaacaaggacagcgatattccgtggcccttgagcatgcgttggccgctagcggcgtggcgttggatgtttgcgccggctgtcgacgagcatcaggcgcaagccgccgctgatcctgtggtgagccgcggtgcctacctggtggagggccttggccactgcggcgcgtgccatacgccacgggccttgaccatgcaggaaaaagccctgagtgccactgacggcaacgctttcctgtccggcagtgcgccgctggagggctggatcgccaaaagcctgcgcggtgaccacaaggatggtctcggcagttggagtgaggaacagttggtgcaattcctcaagaccggccgcagtgatcgcagcgcggtgtttggtggcatgagcgacgttgtcgtccacagcatgcagtacatgtcggaaactgacctgacggctatcgcccgttacctcaagagcttgccggcggtggaccccaaggaccagccgcatcagtacgacaagcaagtggccgaggcactgtggaaaggcgatgacagcaagccgggcgcgtcggtctatatcgacaactgcgcggcctgccaccgcaccgacgggcatggctatacgcgggtgttcccggcgctggcgggtaacccggttttgcagacggcggatgccacgtcgttgatcaacatcgtgttgaacggcggcaccttgccggctacccacgcggcgccatcgaccttcaccatgccggcgttcgcctggcgcctgtcggatcaggaagtggcggatgtggtcagtttcattcggggcagttggggcaataaaggtgcgccagtgaaagccaacgatgtggcggacttgcgcaagaacgatatgcgcaccacctcgggcgatgacctgggccaggttactcaacagcactgatccctggcttaccgccaaacggcactggtcagaagccttgcgcctcgatactgtatataaaaacagtatcgaggcgctttcatgtctactccgctgccgccccgaggccggggcacggccaccaacctgcacaaccgcttcgcaccgactgtcagcgtggtggaggatgacggctggttccaggaagtgccgccgacccatggcactgaagtgcgcatcgaaacggccaagaccatcatcacccgcaacaattcgccggacttgccgttcgatcgttcgatcaacccctaccgtggctgtgagcacggttgtatctactgctacgcgcggccgagccatgcctattgggacatgtcgccggggctggatttcgaaaccagactgatcgccaagaccaacgctgccgatgtgctggaacagcagctgtcgaaaccgggttatgtgtgcgcgccgatcaacctgggctccaacaccgacccgtaccaaccgatcgagcgcgaatacaagatcacccggcaaaccctgcaagtgctgctgcgctatcgccacccggtgaccatcataaccaaggggtcgctgattttgcgcgatctggacctgctcaccgagttggcgcgccagcgactggtggccgtgatgatcagcctcaccagcctggacgacgaactcaagcgcatcctggagccacgcacggcggcgcccaaggcgcgtctgcgcgcgatccgggtgatgcgtgaggcggggatcccggtgggcgtgctgtgctcgccgatgatcccgatgatcaacgacagtgagttggaaagcctgctgaccgaagctcacgcagcgggcgcgcaaagtgcggcgtacatgatgctgcgcctgccgctggaggtggcgccgttgttcgaggagtggctggcggcgcattacccgcagcgtgcggcccatgtgatgagcctggtgcgccaggtgcgtggcggcgaggtgtatgacagccgcttcggcgtgcgcatgcgtggcgaagggccgtttgccgatttgctggcgcagcgcttcagcaaggccatcaagcggctggggctcaaccgccgggaagggtttaacctggattgcacggcgttctgtcctccgggcagacagatggcattgttgtagactgacaaggaggaatgcatcgttcctgtaggaatagtcgcgttttgacatcactgaaacccgcgatctagagcggttcattcagtttgagttaagtttcgacggttaccttgttcagcgagtgactgatgagtcggcactctggcccctggcgttttacaactaatccactggccaagcgtccaactgacctgaacactcccctgcattaatcaagaggatgaatcatgagtgacaaggataaacagccgttggctgcgtcggcttctgcccctcaggtggctgaaaccgccgatgcagcgctaaagcacattgttgacggctttttgcatttccatcacgacgtcttcccccagcaggaagaactcttcaagaaactcgccacggcccagagcccacgggcgatgttcattacctgcgccgactcgcgcatcgtgcccgagctgatcacccaaagttctccgggcgatctgttcgtgacccgtaacgtcggcaacgtcgtaccgccttacggccagatgaacggcggtgtttccacggctatcgagtacgcggtactcgccctgggcgtgcagcacatcatcgtctgcgggcactccgattgcggcgccatgcgcgcggtgctcaaccccgacagcctggaaaagatgccgacggtcaaggcctggctgcggcacgccgaggtcgccaagaccatggtccatgacaactgcgactgcgccaatgaaggcgagagcatgaaggtgctcaccgaagaaaacgtcatcgcccaactgcaacatttgcgtacccacccctccgtggcttcgcgcatggccaatggtcatttgtttatccacggttggatctacaacatcgagaccagcgaaatcagcgcctacgatgccgatcagtcgacgttccgaccgttgagcggcgacggaccgatcccttgcgcgacgcctaaagcgcgcttctaaaacacttccctgccgggtaaagcggtggctgccatggacgcagccaggctttaccgcgcccggcgaatgcctcgggagagccatcatgcgtgctgctcaattgaaagctgtattgccaagggagctgctcgcttccgtggttgtgtttctggtcgccctgcccttgtgcatggggattgcgatcgcctccggcatgccgccggccaaaggcctgattaccgggattatcggtggcctggtggtgggctggctggcgggctcgccgttgcaggtcagcggccccgcggcagggctggcggtgctggtgttcgagttggtgcgccagcatggcatgctgatgctcggaccgatcctgctgctggcgggattcctgcagctggttgccgggcgtttgcgcctgggctgctggtttcgcgtcacggcaccggcggtggtgtacggcatgctggcggggattggcgtgctgattgtgctgtcgcagattcatgtgatgctcgacggcgcgcccaagccttccgggttggataacctggcaggcttcccggcggcactggccgacgcaatcccgaccctgggcggtggcctcggctggcaggcagggttactcggtttgtcgacgatgctggtgatgtacgcctgggacaaattgcgcccgcagaagctgcgctttgtgcctggcgctttgctgggcgtgggcctgaccacggtggtcagcctggtgctggcgttgcaggtcaagcgtgtcgaagtcccggaaaacctcgccgatgctatcgactggctacgccccagcgacctgttgaacctcgccgatccccagctgttgatcgcggcatttgccgtggcgtttatcgcgagcgctgaaacgctgctgtctgccgcggcggtcgaccgcatgcacagcggtcagcgttcggatttcgacaaggaattgtctgctcaaggtgtcggcaacatgctctgcggcctggtcggcgccctgccgatgaccggcgtgattgtacgcagctcggccaacgtgcaggccggcgctaccacgcgcttgtcggcgatgttccatggcctgtggctgctggcgttcgtgctgttgctgtcgagcgtgctgcaaagcatcccggtggcgagcctggcgggagtgctggtgtacaccggtatcaagctggtggacatcaaggcgttcaaggcactgggacgttatgggcggatgccgatgtttacctacgcggccacagcgctggcaatcatctttaccgacctgctgaccggcgtattggtgggcttcgggttgacgttggtcaagctggcgttcaaggcttcacggctcaaggtcagcctgatcgacttgcctcaggacggtgagatggagctgcgcctgacgggtgcggcgacctttctgaaagtgcctgcgttgactcaagtgttgtcgacggtgcctgccgggacgaccgtgcatgttccgctgagcaacctgagttacatcgaccattcctgcctggagttgctggaggaatgggggcgggccaatgcggccaagggctcgaagctggtgattgaggcgcgcgggttgaaacgtaggctggaaggtcgggtgaggacgacgacagggattggctcagcgccagcctgaacagcaaacaacacccctttaggagctggcaagccagctcctaaaggcgggatcaggccggctgatccagcgccaactcaacccccagctgtcgcgacaggcatggccagcgcttccacgcggcttcggtgtccgggctcttgagctgctcgcgataagcctccacggactccagcgcaaagctgtcttcgttgagcatttcatccactgcgtggtgcaccgcttcatccagctggttggcgaaggcttcgccgatcagctgatgggcaatgacattggccactgtggtatcggccggaatcaacggctggccaaagtgcttgatatacagatcgttgacctcttcgaccaggcgatgagccaggtaggcctcatccagcaggccatcgagaccttcatggccggccaggatggcgggcggttgcaggaagaaatgctcggcgatcttcagtaccggcttgatctggctttcgataccggcctcgcgggccacgtcgttggcggcgtccagcaagtccgggactaggtcgatgtaggcggtgacaaagcgtgtcatgacaatgttgcgatcaccgtcagccagagatatggccgaatgcaggtgcggcaattgtttttccagttgcagggcaagctggccagtgctggcttcgtgttgatgggcacgggaaatctgctcgcgcaatgcggcggtgttcatgaaagctccagtgatgcaggcgtaggaaaagggagaagataaggtagctcgtttatacgagcgcctcagacgcatttgtcataattatttcatggttatgcgcctgcgttatatcgaattgccatcgttcgtcggataaacgattccgtgcccggttttattgactccagccagtcatttctactcatttgcccctacacattgcggggttgcagagcctgtctatactcggatttgtacgcgattagctgatgacgccagactgcataagcaggcaaggccaggcggttgtaagcagtatggaagccgctcccttcgacgcaggtgcaaaccggcgggataacaagaacgataaggggaacccgcaatgatgcgacatccacatgtttggatgggcctcctgttgtggtcggtattcggccaggcacatgccgcctggacaacgaatatggcgccaggggcgacagaagtcagtcacgctgtgttcgacctgcacatgaccattttctggatctgtgtggtgattggcatcatcgtgtttggcgcaatgttctggtcgatgatcgttcatcgccggtccacgggccaggtggcggccaagttccacgagagcaccaccgtggaaatcctctggaccgtcgtacccttgctgatcctgatcgcgatggccattccggcgaccaagaccctgatcaatatctacgacagcagtgagtcggatatcgacatccaggtcaccggctaccagtggaagtggcattacaaatacctgggccaggatgtggagttcttcagcaacctggccacgcccgccgaacagatccacaaccaggcgaccaagggcgaacattacctgctggaagtcgaccagccgctggtgctgccagtgggcgccaaggtgcgcttcctggtgacggccgccgacgtgatccactcctggtgggtgccggcgtttgcggtcaagcgcgacgccatccctggcttcgtcaacgaggcctggacccgtgtcgagaagcctggcatctaccgtggccagtgcgccgaactgtgcggcaaggaccacggcttcatgcctatcgtggtcgaggtcaagtccaaggccgactacgacacctggctcggcgagcgcaaggcagaggccgccaagctcaaggaactgacctccaaagagtggaccctggaagagttggtggcccgtggcgacaaggtctaccacaccacctgcgtggcctgtcaccaggccgaaggccagggcctgccgccgatgttcccggcgctcaagggttcgaagatcgccaccggtcctgccgccgatcacctgagcctcgtgtaccacggcaagcccggcaccgcgatggcggcattcggcaagcagctctcggaagtggacatcgccgccgtggtgacctatgagcgcaacgcctggggcaacaacaaaggcgacatggtcacgcctaaagacgtgctggccatcaagcaggcggaaagcaaatgacctctcccatggcattgacctcgacccgccccgcccactcgcttgcaggagaacggccatgagcgctgtgatcgacgaccatggtcacgccgaccatgcccacggccccgccaaggggctgatgcgctgggtgctgaccaccaaccacaaagacatcggcaccatgtacctgtggttcgcctttgccatgttcttgctcggcggctcgttcgccatggtgatccgtgccgagttgttccagcccggcctgcagatcgtgcagccggcgttcttcaaccagatgaccaccatgcacgggctgatcatggtgttcggcgcagtgatgccggcgtttgtcggcctggccaactggatgatcccgttgatgatcggcgcgcctgacatggccctgccgcgcatgaacaacttcagtttctggctgttgccggcggccttcctgctgctggtctcgacgctgttcacgccaggcggcggtcctaacttcggttggaccttctatgcgccgctctccaccacctacgcgccggaaagcgtgacgttctttatcttcgccatccacctgatgggcatcagctcgatcatgggcgcgatcaacgtggttgccaccatcctcaacctgcgtgcgccaggcatgaccttgatgaaaatgccgctgttcgtgtggacctggctgatcaccgcgttcctgctgatcgcggtcatgccggtgctggccggttgcgtgaccatgatgctgatggacatccacttcggcaccagcttcttcagcgcggccggcggtggtgacccggtgctgttccagcacgtgttctggttcttcggccaccccgaggtgtacatcatgatcctgccggccttcggcgccgtcagttcgatcatcccgaccttttcgcgcaagccattgttcggctacacctcgatggtctacgccacggcgagcattgcgttcctgtcgttcatcgtgtgggcgcaccacatgttcgtggtgggcatcccgttggtgggcgagctgttcttcatgtacgccaccctgctgattgccgtgcccaccggggtgaaggtgttcaactgggtcagcaccatgtggcaaggctcgctgaccttcgagacgccgatgctgtttgccgtggccttcgtgatcctgttcaccatcggcggtttctccgggctgatgctggcgattgccccggcggacttccagtaccacgacacctatttcgtggtggcgcacttccattacgtactggtgcccggtgcgatcttcggcatcttcgcctcggcctactactggctgccgaaatggaccggccacatgtacgacgaaaccctgggcaagctgcacttctggctgtctttcgtgggcatgaacatggcgtttttcccgatgcacttcgtcgggctggcgggcatgccgcggcgggtgccggactacaacctgcagttcgctgacttcaacatggtctcgtcgatcggcgctttcatgttcggcgccacgcagatcttcttcctgtttatcgtgatcaagtgcatccgtggcggcccgccggcgccggccaagccctgggatggcgctgaaggcctggagtggagtatcccttcgccggcgccgtaccacaccttcaccacgccgccggaggtcaaatgaacacgccttggcactgcgtacacggccaatgtgggagggggcttgcccccgatggcggtgtgtcagccgacatcatgattggctgtaaaacagctatcgggggcaagccccctcccacaatggcctcattcacattgggtgggcgtcatggctgaatccttgccgatcaagcgcctggtcacgcgcctgctgatcctggtggtggcgatgttcgccttcggctttgcgctggtgccgatctacgacgtgatgtgcaaggcgttcggcatcaacggcaagaccgccgggcagtatgagggcgagcaggttgtcgacccgacgcgccaggtgcgcgtgcagttcctgtccaccaacgccatcgacatggtctgggatttctatgccaaggcggacgaagtggtggtcaacccgggtgcggtaaccgagatgctcttcgtggcccacaaccccaccgacaagccgatgactgcccaggccgtaccgagcatttccccggccgaagcggcgatgtatttccacaagaccgaatgcttttgcttcacccagcaagtgctgcagccgggccagcgcatcgagatgccggtgcgcttcatcgtcgaccgcgacatgcccaaggatgtgaagcatctgaccctggcgtacacgctgttcgatatcactgcgcgccaaccgcccgtggctgtgcacagcggcggctagctactgtttgccccctcaatcaggagagcgaatacatgtcgactcatgatacgtactacgtaccggcgcaaagcaaatggccgataattgccacgattggcctgctggtcaccgtgtatggactggctgtgtggttcaacgacttgaaggcggcacgcccggaatcccacggcccgtggatctttttcgtcggcgggctgctgctggcctacatgctgttcggctggtttggtgcggtgatcaaggaaagccgcgccggtttgtacagttcgcagatggaccgctcgttccgctggggcatgacctggttcatcttttccgaagtgatgttctttatcgccttcttcggtgcgctgttttatgtgcggcacatgtccggcccgtggttgggcggtgagggtcacaagggcattgcgcatatgctgtggccgaacttcgaattcacctggccgctgctcaacaaccctgaccccaaaatgtatcccgcgcctgaaggcaccatcagcccttggggtctgccgctggtcaataccatcctgctggtgagttccagcgtgaccatcactatcgctcaccatgccctgcgcaaaggccatcgcggcgcgctgaaaatctggttggcgatcaccgtcctgctgggtatggcgttcctgggcttccaggccgaggaatacatccacgcgtacaaagagttggggctgacgctcggctccggcgtctatggcgcgaccttctttatgctcaccggcttccacggcgcccacgtgactattggcaccctcattctgttcgtgatgctgatgcgcatcctcaaggggcatttcaatgccgagcaccagttcggcttcgaggcggccagttggtattggcactttgtggacgtggtgtggatcgggctgtttttcttcgtctacgtgttgtgagacggcttaccacggcgcatgagaaaccagttggccgctgaaaaagccccaggtgatcaaggccagggtgatcacggccagcaccacacgcacggtcagggcgttgacgaggcggttggagttgccctcgtccttgaccagaaagaacaagccactgaacaggctcacgacggtcgcgatcagcatcagggcaatagcggctttgagcatggtcgggctccacggggatgggcgggcaatgaaaacaagtatagccagcgccgcaaaacgctttcgtccagggatcgcacccaccttagtggtgctggtgctgctgcccctgatggtggggttggggttctggcaactgtcgcgcggccatgaaaagcagcggctggtggatagttatgccgagcggcgcgcagcggagccggtcagcagtgcgcaactcaatgatatggccgacccggcctttcgccgcgtgcgcctgcgtgggcagttggatgccgagcacagcgtgtttctcgataaccgcatgcgcgacggcaaggccggcgtagagctgctgcaacccttccacgatcaggccagcggcctgtggctgttgctgaatcgcggctggctgccctggccggaccggcgcacaccaccagccttcagcaccccggagcagcccttgaatctggatgcctgggtctacgtcgcccctggcgaaaccttccaactgcacgccgaccccgccagtgcgcaatggccacgcctgctgacggcgctgcaccccgccacgttgtgggcggagttggggcgcagcggtttcgcctacgaactgcgcgccgaacccggccccggcacttacgaaaccacctggcccgtcgtggccatgggcccggaaaaacacctggcgtatgccgtgcagtggttcgccatgtcgctagcgttgctggcgctttacctctacctcggatggcacaacaaaaaggagaagccccatgggagcggccatgaatccacccaacatgtctgaggtgcctgatcggcgcaaaggccgttggcagttgatcctgatcctgatgatggtgatcggcccgatggcgctggccaccttcatgtacaagctgcagttctgggtgccggacagtcgcagctaccacggcgagatgatcggcaacggccagacccgcgccgacattggcgtgccggccgatgagcagcgctggcaactgctggtcaccgcgcccgccgcgtgtgccgccgattgccagcaactggtctacctcgcacgccaattgcagattggcctggggcgcgacgcttcccgtgccagccatgccttggccagtgcgcagccgctgggcagcgactatgacgccaagctcaaggccgagtacccgcaactgcaacgctacccgctggacttgtcgaccttcagtaaaaatgccgctgcgccgggcgatgcgcagctgtggatcgtcgacccccacggcaacctggtgctgcgctacgacgccagggtcaacggcaaggacttgctcaacgacctgcgccatctgctgaaactgtcgaacatcggataggggcatcgtcatggccaaacctggatttcgcctcgcgttgtttgcgaccttgctggcgctgattgtcgtgctgctgggggcgtatacccgcctgacccacgccggcctggggtgcccggattggcccggctgctacggctttatcagcgtgcccaacaccgaggctcaactggcccatgccgagctgcatttccccgatacaccggtagaggccgacaagggctgggccgagatgacgcatcgctacttcgccggcaccttgggcttgttgattgtgttgctggcggcgcgctcgtggagccatcggcgcaatccgggccagccggtgaaactgccgctgttcgtgctggcggtggtattcgcccaggccgcatttggcatgtggacggtgacgttgaagctgtggccgcaggtggtgacggggcatctgttgggtggctttgcgacgttgagcctgctgttcctgctgaccttgcgcttgtctggcgtattgccggccttgatcgtgcccaagcgcctgcaatattgggcgacggcaggcctggtgctggtgatcagccagatagccctgggcggctgggtcagttcgaactatgcggcggtggcctgtatcgatttgccgacctgtcatggcgagtggtggccggcagccgattttgccaatggcttccatctcacccaacacatcggccccaattacctcggtgggcagttggacagcgaagcgcgcaccgccatccacctgacccaccgcatcggcgccgtcgttgtcagcctggtgctggtgggccttgcctggcaattgcgcgcggtcggcatgacgcggttggccggcttgctgctgatcgccctggcggcgcaaatctgcctgggcctgagcaatgtgtatttccatctgccgctgccggttgcagtggggcataacgcgggcggtgcggcgttgttgctggcgctggtactggtcaactaccacgcccgcaccagcctggtccgggtgcgcaaccagctgccgtttggctggcgctttatcccgcgcaagcatgtgtcgggcctcgttacccttaaaggagagatgccatggcgaccttgatcggcgcgcgtcacggccaggccatctggcgtgattatctggagctgaccaagccgaaggtggtggtgctgatgctcatcacctcgctggtggggatgttcctggcgacccgcgccggtgtgccgtggaccgtactggtgtttggcaacctggggattgccctgtgtgccggtggcgcggcggcggtgaatcatgtggtggatcggcggatcgatgcggtgatggcgcgcacccacaagcggccgttggcgcaaggccgtgtgtcgccgctggcggcgctggcctttgctttgtttctggctgttgcagggttggctctgctgctggcgtttaccaaccctctggcggcttggctgacgctggcctcgctgctcggctatgcagtgatctacaccggctttctcaagcgtgcgaccccgcagaatattgtcatcggcggcttggccggggctgcgccgcctctgttgggctgggtcgccgtgaccgggcatatcagcgccgagcccctgctgttggtgctgatcatcttcgcctggaccccgccacacttctgggccttggccatccatcgcaaggaagaatacgccaaggccgatatcccgatgctgccggtgacccacggcgagcactacaccaaggtgcacatcctgctctacaccttcgccctgctggcggtgagcctgatgccctacgtgatccacatgagcggcctgctgtacctcggctgcgccctggtattgggcgggcgctttctgcaatgggcctgggtgttgtaccgtggcggtcggccgcacgcggcgatcaacaccttcaagtactctatctggtacttgctgctgctgtttatcgccctgctcgtagaccactacctactgttgaacctatgactcgaactcaaaagactgtcttcatcctagtggccctggtggcattgatcatgggcctgaccgttaacaaagtgctctcgggcaagggccagggcgaccccactgccttgatcgacgccggcatcatcctgctgccgcaaagtcgtcaactgccgccggtgaccatgaccaaccaggacggccagccagtgctggtcaatgaattgaaaggcaagtggagcctgttgttcttcggctacaccttctgcccggacatctgcccgactaccctcgcccagctgcgccagatcaagagcgagctgcctaaagaggctgtggataagttgcaggtgattttggtcagtgtggacccgaaccgcgatacgtcgacccagctcaagcagtacctgggctacttcgacccgcagttccagggcctgacgggcgcgaatgtggaggaggtgcagaaggtctcgaatgcggtgagcatcccgtttattccggcggacaccagtaagccgaactacaccgtcgaccacagcggcaacctggcgctgatcgggccggatggaacgcagcgtgggtttattcgtgcgccgctgaacaaccagaagctggtggcgcagttgccagcgttgctgcagcgtcaataacaggcgacacataacaaatgtgggagggggcttgcccccgatagcagtgggtcagccaccaaagcagtgactgacactcagcaatcgggggcaagccccctcccacattttttgatctccagtacttgggagatcgggttacatcagaacgccggcttgatcgcgcctttgtacttctcttcgatgaattgcttcacttcaggcgtgtgcagggctgcaaccagcttcttcacggcgtccgagtccttgttgtcttcgcgggtcaccaggatgttcacgtaaggcgagtcgctgccctcgatcaccagcgcatccttggacgggtccagcttggcttccagcgcgtagttggtgttgatcagcgccaagtcgacctgggtcagtacgcgcggcagggtagcggcttccagctcgcggaatttcaggcctttagggttggcggtgatgtccttgatggtcgacaggatattggtcgggtccttcaaggtgatcaggccgttcttggccagcagcaacagtgcgcgaccaccgttggtggcgtcgttggggatcaccacgttggcaccgctaggcagctcgtccagcttcttgtacttgctggagtacgcgcccagaggctccaggtgcaccgcgccaacgctcaccaggtgagtgcccttggctttattgaattcatccaggtacggctggtgttggaagaagttggcgtccaggcgcttttccgcgacctgtacgttcggctgcacgtagtcggtgaagactttgacctgcaggtccacgccttctttggcgagggcaggcttcacgaattcgaggatttccgagtgtgggaccggcgaagcggcgaccgtgatggtctcggcgtgggcggaaaacgcggcaacggcggcgaaagcaaccagtagttttttcatccaacaagctccttgttcgggcatgtgccggcatgtcaccggcaatggccgttattttcgagaaaagtgcaccaccagcttgtcgccgacggtttgcagaatttgcaccaggatcaacagcatcaccactgtgaccaccatcacgtcagtctggaaacgctggtaaccgaaacggatcgccaggtcgcccaggccaccggcacccaccacaccggccatggccgtgtaggacaccagtgtaatcgccgtcaccgtgatcgccgcgaaaatgcccgggcgggcttcgggcagcaaggcgttggtgatgatctggcgcgtgctggcgcccatggactgggtggcttcgatgatgccgcggtccacttcgcgcagcgcggtttccaccaggcgtgcaaagaacggggtcgcgcccaccaccagtggcggaatcgcaccggccacgcccagcgaagtgccggtgatcagcacggtgaacgggatcatcacgatcagcaggatgatgaacggcagcgagcgcaggatattcacgatcagcgacagcagcgcgtacaggcctttctgttcgaacagttggcgcgggctggtcaggaacagcagcacgcccaggggcaggcccagcaccacggtgaagaacagcgagccgaacagcatggtcatggtgtcgccggtggccagccagatttcggaccagtcgatattggcgaagaaactcaacaggacgtccattagcgcaggatctccatgtggacatcagcggcggtgaagcgcgcaaacgcggcttccatgtcgccaccggtgacggcgagggtcaattgcccgtaagggatgtctttgatgcggtcgatacgaccggcgaggatgctgtagtccacgcctgtttcgcgggcgacggtgcccagcagcggcgcgtaggtcgcttcgccctggaacgtcaggcgcacgatacggcctggcacgtgggcgaagtcgtcgcgctgctcgttttcgtcgacctgctcggactcttgcacgaagcgcttggtcgtcgcgtgcttggggtgcaggaacacatcggccaccgagccttgctcgacgatcacgccagcgtccatcaccgccacctggtcgcagacgcggcggatcacgtccatttcatgggtgatcagcacgatggtgagcttcaactcgcggttgatctcggccagcagttgcaataccgaggcggtggtctgcgggtcaagggcgctggtggcttcgtcgcacagcaggatctttggtttggtcgccagggcgcgggcgatgccgacgcgttgtttctggccaccggacaactgcgccggatactttttggcgtggtccgacaggccgacgcgggcgagcagttctgcgacgcgcaggtcgatgtccttgcgcgacagttcgccggccagggtcagcggcagtgccacgttgtcggccacggtcttggaggccagcaggttgaagtgctggaagatcatcccgacctgctgacggaagcggcgcagaccgttggcgtccagggcggtgacttcttcgccgtctaccgtgatcttgccaccgctcggttcctcgaggcggttgatcaggcgcagcagggtgcttttacccgcaccggagtggccgatcaggccgaacacctggccgtttgcaacactcaggttggtggcgtgcagtgcgggaatatccctaccggcgacgcggtaggttttatggacgttttgaaactcgatcacgtagcgaaccttgtggggcgcatggaaaagggatcagcggttagccgggcgcgcattttagcctgtccgtatagcgtttcttagcatttatttcgcattcaaccagcgatttggcaataacgcgatcaaaggtcataaaaaaggaacggcccaaaaccccatcagtcactacttaagcaatgcgattcccgggtgccgtgcctgggtctgaataaggagttttgactgatgagtacgaaaaagccaaagagcgaactcgcagggaccgacaccctggaccgtaagaacaccaatgccaagctagagtctttggaagaattccgctccgacgctaccggccaggccctgcgtaccaaccagggtgtgaagatctccgacaaccagaacagcttgaaggtcggcgcacgcgggccgtcgctgctcgaagatttcatcatgcgtgaaaaaatcacgcactttgaccatgagcgtatcccggagcgcatcgtgcatgcccgtggtactggcgcccatggctattttcagacttacgagaaccattcggcgctgaccaaggccgggttcctgcgtaaccctgggcataaaacgccggtcttcacgcgtttttccaccgtgcaaggcccgcgtggttcgggtgacaccgtacgtgacgtgcgcggttttgccgtgaagttcttcaccgaagaaggcaacttcgatctggtgggcaacaacatgccggtgtttttcattcaggacgcgatcaagtttcctgacttcgtgcacgccgtgaagcccgagccgcacaatgaaatccctacaggcggctcggcgcacgatacgttctgggacttcgtctcgttgcagcctgaatcggcgcacatggtgatctgggcgatgtctgaccgcgccattccaaaaagcctgcgcagcatgcagggttttggcgtgcacaccttccgcctagtgaatgccgagggaaaatctaatttcgtcaaattccactggcgccctacagccggtacctgctcgctggtgtgggacgaagcgcagaagctcgccggtaaagataccgactaccatcgccgcgacctctgggaagccattgagatgggcgactaccccgagtgggaattgggtgtgcaggtgattcccgaggacaaggagcatgcgttcgacttcgacatcctcgacccgactaagctgatccctgaggaactggtgccgattacgccgctgggcaagatggtgctcaaccgcaacccggacaacttcttcgctgaagtcgagcaggtggcgttctgcccaggccatatcgtgccgggtatcgacttctccaatgacccactgctgcaaggtcggttgttttcctacaccgatacgcaaatcagccgactcggcgggccgaattttcaccagttgccgatcaaccagcctgtgacgccgctgcataacaaccagcgcgatgccatgcaccgcagcaccatcgataaagggcgcgccgcttatgagccgaactccatcgatggcggctggccgaaagaaaccccaccggctgcgcaggatggcggttttgagtcctaccctgagcgtatcgacgcgcacaagatccgtgagcgcagcgagtcgttcggcgatcacttctcccaggcgcgtctgttcttccacagcatgagcaagcacgagcaggagcacatcattgctgcctacagctttgagctgggcaaggtcgagcgcgagtttatccgtgcgcgtcaggtcaacgagatcctggctaatatcgaccttgaactggccaaacgcgtggcgcagaacctggggctgcccgcgccgaccaaaggcacggtgccggtacgtaaaacccagccggagcgttcgcctgcgctgagccaggcgaatttgctgccgggcgatatcaagacccgcaaggtggcgatcctggcagccaacggggtggacggggcggcgattgctgcattgaagaaggcgctgcaggccgaaggtgcgcatgccaagctgctggggccgacctcggcgccggtgaagacggccgatggcaagagcctgccggtggatgcatcgatggaaggcctgccgtcggttgcgtttgatgcagtgttcatccctggcgggaaagattcggtgaaggcgctgagtggcgatggggtggcgctgcattacgtgctggaggcgtacaagcacctgaaggcgattgccgtggccagtgatgccaagcctctgttggatctgctgaagcttgaggcggatgcggggttgatcgtgggcgcggacgctaaggcgttcaaggcgttctttgccgcgattgggcagcatcgggtgtgggatcgtgaggcgaaggccaaggcgattccggcttaagtctttggttgtttgttagattgtcatcgggggcaagccccctcccacattttgagctgtgaatacattaaaagtgtgggagggggctttcccccgatggttttattccgccttgcgcggaatcagcacaacctgcgccggaatcttcttcagaatctgccggtgaatcttcaggtcataccccgaatcaattcgcttcacccgtttggtcagcaacgtggccagccatgggtaatcctctgtgcgcggcgcctggatgcttacatcgcactggtaattcaccacgtcggtggcaatggcatccagctgatggcgcagttcttcgatgttggtgaggttcagtgccacggtggtgctgggtgccgtcgggtcgatgaccttggcggcgggcttggcttcggcggctttcaggtcggcttcggctttgtccagctcggccttgcgcgcatggctgatggcgctgttgaccccaccggtcagcgcgggtgccttgggcatcagggcgcgggcacggctaagggcggtcgcggcggcgtttacatcacccttttgcagcacgatctggctgcgttgcaagtaggcttcggccaattgccgctggtaggtttccagcgttgggtcgttgggcgattgggcttgcagcgccgccaattggtcctcggcagtggcaagctcgctgctgaccaggttttgctccagctgtgcgatggccgcagcgcgtgcgtccggggcctctgggacggcgggcggtgtgctttgacaggcgcccagcagcagggaaaatgcggcaaggagcagataacgggaggtgaacggcttcattcctgcgactctctatttgcgcaaaaagcgagcaagtctacacccctcgacggggcaggacaaaactcagcagaaacagggcggcggccgtgaccacaatcgacggcccggccggcgtgtccttgaaccaggacaacgccaggcccccgcacacagcgagcatccccagcaggctggcgcccaccgccatctgctccggtgagcgggcgtggcgctgggcagcggccgcgggaatgatcagcagcgacgtgatcaacaatacgccgacaatcttcatcgcgacagcgatcaccacggcgatcaacaacatcagggccatgcgcagggccggcacgggcaagccttctaccgtagccagttcttcatgcacggtaatcgccagcagcgggcgccacagggcgaccagcagcaccagtacagccgcgctgccgccgaggatccaggcaaggtcgccggggctgatcgccagcaggtcgccgaacaggtaggccatcaagtcgatgcgcacttcatgcatgaagctcagcaccaccaggcccagggacagggtgcttggcgccaggatgccgagcaaggtgtcggaggccaggggctggcgctgttgcagggtcaccagcagtaccgccaacaacaggcagccgactgtcacggcgatggtcgggctgacatccaacagaaagcccagggccacgcccagcaacgcggcgtgcgacaaggtgtcgccaaaataggccatgcgccgccagaccacaaacgagcccaatgggcccgccaccaacgccaaagccaagcctgccagcagggcgtagagcagaaaatcagccatgcttgcagctatctccatgaacgtgggtgtgaggggcggcggggtcatcgacgacggcgccgtgcagatcgtgggcgtggtcatgatgatggtggtagatcgccaggctctgggcgttcttgccgaacagctcgacgaacgccgggtcgccgctgacctgttccggatggcccgagcagcacacgtggcggttgaggcacaccacctgatcggtggtgctcatcaccaggtgcaaatcgtgggacaccatcagcacaccgcaaccatgacggtcgcgcaggcgggtgatgaggctgtacagctcggcctggccggcgacgtcgacgccctgcacgggctcatccagcaccagcaactccggctcgcgcagcagggcgcgcgccagcagcacgcgctgcatttcgccgccggaaatgctttgcactgggctgtcgatcacctgttcggcaccgacttccttgagcgcagcctgggcgcgtgcacggtccacgccaggcaccaggcgcaggaaacgcaggacggacaatggcagggtcggatccacatgcagtttctgcggcatgtagccaacacgcagcctgggcttgcgccacacactgccggtgtcgggcttgagcaggcccagcacggcgcgcaccagggtggtcttgccggcgccgttggggccgatcagggtaacgatctgccccggttccacgctcagtgcgatgttatccagcacgttttgcccggcgaacgtgaccccgacctgttccaggcggattaacgcgttgctcatcaagccccctggcagcccgagcacaggccgaccacttcgaccgtttgcccttcgacccggaagccgacctcggcagaacttttgatgatggcgtcgctgatgcttttttgttcaagctcgatggcggcgtggcactcgcggcagatcaggaactggccctggtgtgcgtgttccgggtggctgcagccgacgaaggcgttcagcgaggcgattcggtgcaccaggccgttttccagcaggaaatccagcgcgcggtacacggtaggcggcgcggcgcggcggccgtcctgctcgctgagcacgccgagaatgtcgtaggcgcccagcggcttgtggctctgccacaccaattccagcacgcggcgacgcagtgcggtcaggcgcagacccttctgtgtgcacagggtgtcggcctccgacagcgcggtatgcacgcagtgagagtggtcgtggggacggctggcaagcggtgttttaggcatgagcggcgacagatatttgatagagacgttattatgttacccgttcctacgccattgagtggtcatcgtgtcccgactttttcccgtttttgtcgtatttgtcaccagtttgttcattactggcgccgctcaggccgaggtcaaggtgttgaccagcatcaagccgttgcagttgatcgcagcggctgtacaggacggtgtggcggttccggaggtgctgttgccacccggcgcgtcgccgcataactatgcgttgcgtccatccgacgtacggcgtgtgcagtcggttgacctgctgtactggatcggcccggatatggagagtttcctgccccgtgtgctgaaaggtcgtgcggctgcaactgtggcggtgcaggatctgccggacatgaagttgcgtcgttttgccgaagatagccactcacacgccgatgaagccgacgagcatgatcacgatcaccgcccaggcagcctcgatgcgcacttgtggctgtctaccgtcaacgcacgtgtgattgctgcgcgcatggcgactgacctggccgccgccgaccccgccaacgccgcgcgttaccagagcaacgtgaaggccttcgacgagcgcctggatgccctggatgctcgcctgaaagcccgccttgcgccgatcgatggcaagccttacttcgtgttccacgaagccttcgattacttcgaagacgcttatgggctcaagcatgccggtgtgttcagcgtggcagctgaggtccagccgggcgcccagcatgtggcggcgatgcgcacccgtttgcaggaagtgggcaagacgtgtgtgttcagtgaaccgccattgcgtccgcgcctggctgaaacgctggtggccgggttgccggtgaagttggcggagttggatgcgctggggggttacacgccggccacggctcagggttatgagcaggtgctggataagttgggcaacgatctggcgggttgcctggagtcactctgacagcaaacgacgaccaaatgtgggagggggcttgcccccgatggcggtgtgtcagtcactaatatttcgactgattcactgcaatcgggggcaagccccctcccacattttttgatctcacaggtctttagagggcaaatggcagttgcacggtgacctgctgacgctgcaccagccgatgctcgaactccgccgggtcatggatcaacacatcctgcccggcaaacgactcagcggcgatcaggcgtgacagccagaaccgcacacaggccacgcgcaacatcgtcggccacagttctgcctctttcgcggtaaacggccgcagccccgcatacgcccccagcaatgcccgggcgcgttgcccatcgatcacgccatcggcgtccgagcaccagtcattcagggcgattgccacgtcgtacaacatcgggccggagcaggcgttgtagaagtcgatcaggccggtgaggtgcgtgccttcgaacattgcgttgtcgcggaacaggtcggcgtgcacattggcgcgcggcagggcgaggatctcggccttgtgcgctgcgatctcggtcagggcatcttgcagcaggcgctgctgtgcggcgttcaggtgcgaaatcagttgcgcaccttcactgagcatccagtccaggccgcgatcggtcttgcgttcgaggactttctcgccctgcgtggccaggtgcagatggcccagcaggtcgccgacctgggcgcagtgctgagcgttggcatccttgatgtgcttgccggccagacgcggttgcagcagcgccggtttgcctttgagttcgcgcaaggctacgccgtcggtggtgcgcagggcgtaaggcaccggcaggtcggcgtcgtggagcacgtcgagcagttcgatgaagaacggcatttccgcaaccgggccgcgctcgaccagggtaaggacgaactcaccctgctccaggctgacaaaaaaattggtgttttcgctaccggcggcaatcccctggaagtcgatcaggcggccgaggcggtaaggggcaagaaaggtttccagctcgggccgagccaggggggtgaacacagacatggttaaaactgccagtacgggcgccgcggtgcgcggcgccaattgaagttaagaaatcatttccattcgaagatcttccatgacgggatcagcatatccggctggtcagaacggatgaagttcgcatcggttccgtccgcacgcaccaggaaatacggcggtgcgccttttacagtcaccttgatcgcgtacaggaaaccgttttggcgatattcctggatagttctgtcgccttccgtgcgaatggtcacttccggatcacccgaaggcgcgctgtccgccgccatggcagccatcggagtgagtgcaatcaagccagtcaacagcaggcgattgaatgtacgcatgataaccttgtccctttgtcgtcattggtccggctattctagcgcctgacccgccgaaaaggttgattctgctcatgagccaagcacccctcgtcctggtggacggttcttcctatctgtaccgcgccttccatgcgttgccaccgctgaccacctctaaaggcctgcctaccggcgcggtcaagggcgtgttgaacatgctcaagagcctgcgcaagcagtacccgggtagccccttcgcggtggtgttcgacgccaagggtgggacctttcgcgatgatatgtacgccgaatacaaggccaaccgcccgagcatgcccgatgacatgcgcgtgcaaatcgagccgttgcaccagagtgtgatcgcactgggcttcccgttgctgtgcgtcgaaggcgtcgaggccgatgacgtgatcggcaccctggcgcgcagcagtgcggcggctgaccgcccggtggtgatctccaccggcgacaaggacatggcgcaactggtcgacgggcacattaccttggtcaacaccatgaccggtagcgcgatggacatcgagggcgtgaaggagaaattcggtgtcgctcccgagcagatcatcgactatctggcgctgatgggcgattcgtccgacaacataccgggcgttccgggcattggcccgaagactgcttccggcttgctggtcggcgtgaacggcggcatcaaagagctttatgagcagctggatatcgtgccgaccttgcctatccgtggcgccaagacgctgccggccaagctggaagagcatcgggagagtgcttttctttcctaccagttggcgacgatcaagtgtgatgtgccgttggatgttggcctggatgatctgcacctgaccgagccggatcgcgagaagctgctggagttgtacacgttgctggagttcaagagctggattgatgagatccagcgcgacgccaagcgtttggagctcaaggctgcgccggttgccgaggaagctgttgaggcggcagcaccggcagagaccctctacaccaccatcctcgaccaggcgacgttcgacatctggttgaagaagctcaacgacgcgaagttgttcgccttcgacaccgaaaccaccggtatcgatgcccagcaggcgcagttggtcggcgtctccttcgctgtgcaggcccatgaggcggcctacatcccgctgacccattcctacatcggcgcgccggagcagttggaccgcgacactgtgctgctggccctgaaaccgctgctggaagacccgaccaagctcaaggtcggtcagcacgccaagttcgacatgaacatcctggccaactgcgccatcggtggcgacccggcgcagggcatcaccgtgcgcggcatcgcgttcgacaccatgcttgaatcctatgtgctgaactccacggcaacccgccatgacatggacagcctggccaagaagtacctggactacgacaccgtcgccttccaggacatcgccggcaggggcgccaagcagttgaccttcgaccagatcgccctggagcaggccggcccttatgcggccgaagatgccgatgtgaccttgcgtctgcaccaggcgttgtttgcacagctgacggccatcccgagcctggcgagtgtactcacggatatcgagattccattggtatcggtgttggcccgtatcgagcgtcagggtgcgctggtggacaaggacctgctaggtgtccagagcatcgagctgggcaacaagatggtcgagctggagcgtcaggcgttcgagattgccggtgaagaattcaacctgggctcgcccaagcagctcggcgcgattctttacgaaaaactcggcctgccggtactgaaaaaaaccggcaagggccaggcgtccaccgccgaagaagtgctggccaagttggctgaagatgactacccgttgcccaaggtgctgatgcagtaccgcagcatgagcaagctgaaaagcacctacaccgaccgcctgccggaacagatcaacccgcgcacagggcgtatccacacctcctatcaccaggcggtggcggcgaccggccgcttgtcttccagtgatccgaatctgcaaaacatcccggtgcgcaccgccgaagggcggcggattcgccaggcgtttgtcgcgcccaacggctataagctgctggcggcggactattcgcagatcgagctgaggatcatggcgcacctgtccaaggacgaaggcttgatgaacgcctttcgtcacaacctggacgtgcacaccgccacggccgccgaggtgttcaaggttgagctgggcgaggtcacctccgaccagcgtcgcagtgccaaggcgatcaacttcggtctgatctacggcatgggcgcgcagaagctgggcaaggatattggcgtcgataccaagacggccaaggcctacatcgatgtgtatttcgcccgttatcccggggttcgcgagtacatggagcgcacccgcgcccaggcggcagaccagggttacgtggaaaccttcttcggccgccgcctgtacttgcccgacatcaactccaacaagccccaggagcgcgcggccgctgagcgcaccgcgatcaacgcgccgatgcagggcactgccgcagatatcatcaagaaagccatggtgctggtggacaactggctgacggattcgggcctggatgccaaggtgatcctgcaggtgcacgatgaattggtactggaggtgcgtgaggactcggtggcggaggtcagcgagaagattcgcgagcacatgagtgcggctgcgaagctggacgtaccgctgctggtggaagtgggtgtgggcaataactgggatgaagcgcactgatttgcgggctctgccatcgcgttgagtggtggcagagtgctttagtgcggaaatcactgtcggttatttcaaatagtttttctggcctgccggaacttaacccgtgaactgctactcagagttactgaatgggtggtgaagcccttcaatgctcctatgttgtgttaagtgttggcagatatctggaccccgccctagcggtccggaacttgaaccccgaacttcccctccccatacgaagtccggggttttttttgcctgcagaaaagttattccgcgagttccgcgcccttgtccgccaattccatccagccagccagcacggtgtaagcctcttccaggcccatgcgctttggtgccgagaacagctggatagtgatcgcgtcgccccagcctttacggatttcggactgcactttgagcaaggtgttcttggccgcgccgtaggtgagcttgtctgccttggtcaacaggatatgcatcggcatgccgctggcgaccgtccaatcgagcatcaacaggtcgaaatcggtcatcggatggcggatgtccatcatcagaatcaaacctttcaaactctcccggccacccaggtaagcctccaggtgacgctgccagtgcagcttcaacgggataggtacttttgcgtaaccgtagcccggcaggtcgaccagacgccgatcatcgtctagcttgaagaaattgaggagttgcgtgcggcccggggttttcgaggtgcgtgccaggctggcgtgagtcagggtgttcagtgcgctggacttaccggcgttggaacgaccggcaaaggcgacttcaaagccttcgtcatcggggcattggtcaactttggcggcgctgagcatgaacgtggactgttggcacaggccgaggatgggattcttgagttgcatgagatttccgatgtgggcggtgccgagaaagggtgcggcaagcggtgtcgtttccgtttcagtagcgccagtatataatgccgcagattttgtgtgtgctttgtcccagcgaaggatgaagttcacgggagcgatagacctttattgcgcattagaacgcaaaacgctctcaaaccctgaaatggtcgacgtatgaccaggtggttgctcgctatcggtgtcctggtcccgctttgcggcgctcaggctacacaggatccggaagcggtgtacaaccgagtttgcgtggcttgccatgccggccagttgcccaacgcccccagacggggtgaccaggcagcctgggcgccaagactggcgcagggcatggacacgctggtgcaacacgtgacccagggtttcaaggcaatgccgccgcgtggtttgtgcatggactgcagtactgaggattaccaggccatcattgaattgatggtgagtaaacccggtagataactcttaaaccccttagccgtagttggattagctgatgaacaaactgatcgtgagtctgctgttgaccttgggcatcaccggtgttgcccatgctgcaggcgacgctacagcgggccaggcgaaagccgccgtatgtggtgcttgccatggaccggatggtaacagcccggcgccgaacttccccaaactggccggccagggcgagcgttacttgaccaagcagatgcaggatatcaagtccggcaagcgcacggtcctggaaatgaccggcttgttgaccaacctcagcgatcaggacctggcagacatcgcggcgtattttgccagccagaaaggcagtgtgggagctgctgatccgaaactggtggcccgcggcgagaaactattccgcggcggtgacctggacaaaggcctgcctgcctgcaccggctgccattcgcccaatggcgcgggcatcgccgctgccggcttcccgcacttgagtggccagcacgccacctacatcgccaagcagctgactgatttccgcaaggaagaggccgggcgcacaaacgatggcgacgcagcgatcatgcgcaccatcgcgcgcaagctgagtgacgaggacattgcggcggtctccagctacatccagggcctgcactgaggtgcacgcaacgttaacactcgattaatcccgtgatgcaagcataaaaagggtggcccaggccgcccttttttgtggccggtgccgttacactaacgaactcatgcccgcgtagacctgtcacaacaaaggtcgcgtgaggcgactttatttgtccaggagtaaagcatgcgtaatctgatcctcagcgccgctctcgtcactgccagcctcttcggcatgaccgcacaagctgccgacgtgccgcttgaagccggtaagacctacgttgaattggccaacccggttccggtttccgagcctggcaagatcgaagtggtggagctgttctggtatggctgcccgcattgctacgcttttgaaccgaccatcaacccatgggttgaaaagctgcccaaggacgtgaacttcaagcgcatcccggccatgttcggcggtccatgggatgcccacggccaactgttcctgaccctggaagccatgggtgtggagcacaaggtccacaacgcggttttcgacgcgatccagaagcaaggcaagcgcctgaccaagcctgacgaaatggctgacttcgtggccacccagggtgtcgacaaggacaagttcctggccaccttcaactccttcgccatccagggccagatcaagcaggccaaggagctggcgcagaagtacggtgtgcaaggcgttccaaccatgatcgtcaacggcaagtaccgtttcgacctgggcacttccggtggtcctgagcagaccctcaatgtggccgaccaactgatcgccaaagagcgcgcagccaagtaaggggcccgtcatgcgccgctggggtaccgaacgtgtggttggcctgcatgatccgcaggtcaacgaacatcacctggagtccacgggcctgccggcagacagtcgtctgcgcctgctcagcttcaatatccaggtaggcatcagtaccgagaagtatcggcattacctcacccgtggctggcagcacctgctgccccacaacgggcgtgctggcaacttgcaaaaaatcggcaacctgctgaacgacttcgacctggtcgccctgcaggaagctgatggcggcagcatgcgctccggctatatcaaccaggtggaacacctggcccagctgggtgccttcccctactggtatcagcagctcaaccgtaacctcgggcgcctggcgcagcacagcaatggtgtgctcagtcgcttgaagccctcagtcatcgaagatcacccgttacccggacccaaggggcggggtgcgatcctcgtgcgctttggcgaaggcccggaggccttggtggtcgtgatgatgcacctggcactgggtgcgcgtactcgcacgatgcaactggcttacatccgcgagcttattggcaattacaaacaccaggtgctgatgggggacatgaatacccacgccagcgacctgttgcagaattctccgttgcgcgacctcgggctactggcaccgcaagctgaagccacgtttcccagctggcgcccgcaacgctgtctagaccatatcctgctcagtcctaccctcacactcgagagcgtgcaggtgctggcgcagcccatctccgatcacctgccggtcgcggtagagattcgtctgccgggttcgctcacggctgatgcattacccgcgttgagcccaggcccccgcggaccccttgcatgagcgacgacgcccagcgctggaaagagaaatacctcaagagcatcgagcaacaagagaaactcgaacgtcgctgggctgcccgtctcgacctgctgcgccgtggactggtgcgcagcacgctggcggctgagggcactgatcgcgcagtcgaccaatgcatgaaggaaatgcgcgacgttgtccgtaccgatgacatggacgccgccctcgctgccttgctgccgcgcctggaaaaagctgtgctggactccgagcagcgccgcgaaacccgggtcgaccagatcagcaccgcgctgacgtcgctggtcacgcaactacagaaacttccgttgccccgtgaggtggcccggccgctgaagacgttcgccaagcagttggacggccgcgtcggccaggcgcgagagatcccgctgttgctcagcgagttgagcggcctgcaaggccaggcgctgaacaacctggagccggacggcgaagctgcgcgaccagggcctgggcttttgcagcgcctgttcggtgccaaggaagttgcgaacgaggcggtggcagacgaatcgacaccccgaccggccccgcagcctgcggcagccaagccagtcgctgtcgagccacagccgtccgagcaatccgaggaactgacgcaagcgttgcgtgcctttgcgccgcagcctcaagaaacggtcgctcctgtcatcgagcccgtagcccccacccaggtggtcgagccctccagcgaaacctcggtctatgaagccccgcctcaagccttagcgattgagacacccgttgcgcgtgtcgagcctaagcctcaagtcgaagaacctgcagcggaaagcgccctcgccgccttcatcgaaacgcctgaagtgcaggtcgagaccccggatgagaccaccattggcagcttgtcgctccctccagtgctggaggagcctgatcctgacgagctgcaagcggatggagcctatgccctgcccgactcaccggagccgtcctatagctccgtggccaagcacatcgaagacaccctgctcggcctgctcgaagaactctcgttacccgagcgtcaccgcccccaggccgaagccatgcgcgagcgcctggcccacggcttgaactggtacgagctgttgccgatcctcgacgacctggcagtcttgatgctggcgatcaccgacagcggccagcatgagttcgaggcttacctcaagcagttaaacgagcgcctcgaggcgttccagggccacttgcaagtcgccagcgaggggcatgccgacagccgctccgccgcccgtgagctggacacgcagatccgcgaacaggtcgatggcctgcaaagcagcgtgcaggaagccgccgacctggacagcctcaagcacgtgttggaaagccatctggaggggctgctcggcaccatggatgagcaccagcagcagcgcgacctgcgcgagcaggagacggcggcgcgcctgaagggcttggctgagcgggttgccaatatggagcaagaggcccagggctatcgcgagcacctggaggtgcagcgccagaaggcgttgatcgatccgctcacgggcctgcccaatcgtgccgcctggagcgagcgcctcgattatgaggtgaacacctggcaccagcgcggcaataacctgtcgctggcgatgctggacctggatcacttcaagcgtatcaacgatggttacggccacctcgctggcgacaaggtgctgaagatcatcgccaacgtgctgcgcaagcgcctgcgcccgaccgactttatcgcgcgctttgggggtgaagagtttgtgttgctgatgcccgactcatccctggcggatgccctggccgtgggcgaggtgttgcgtgcggcgattgaagcgtgcccgtttcacttcaagggcgagccggtgacgatcaccgtgtccatgggcgtggcgcagttccagccgggagagcgcagtgacctggcgctcaagcgtgccgacgaagcgttgtatcgggccaaggccgccgggcgaaaccaggtgcaggccgcctgaaagatgttccattttgtgatttgaccgctggctcgcgatcggtacgttacactgttgcattatcgtcttctgcgtaacgtctaccgccatgaaatccttgtacttcgcttttgtgttcattctgctcgcaggctgtgccagcggccctcgcctggacaccagccacccctcggtgaaccacgacaaccgcatgcagttcgtagtcgtgcattacacctccaccaaccttgagcgctccctggccttgctcacccatggtcaggtcagcagccattacctgatcggcgacgacgcctcggccaccatctacaagctggtggacgagagccagcgcgcctggcatgccggggaaagcgaatggatgggccgcacctggctcaactccagctcgattggcatcgagatcgtcaatcctggctacaaggacacacctacgggccgcttgtggtacccctactcagaggcgcaggtgaagtccctggtggtgttgctcaaggacatcagcaagcgcaatggtatcgaccccaagaacattattggccacagcgatattgcgccgttgcgcaagcttgatccgggcccgttgttcccctggaagcggctggccgccgaagggttgggcgtttggccggatgcccaggccgttgcgcgcttccaggtgcaatacgccgccgagctgccaagcgtcacctggttccaggaagaactggcccgcctgggctaccagacgccgcagaccggcgagttggatgtggccacgcgccatgtgatcgcagcgttccagatgcatttccggccgtcgctgtttgatggcacgccagatgcggaaagtgccgcgatcctgcgagcgttgaaccgaagctagagtggcaacgccatatagaactgagtgccctgccctggccgcgagtacacgcccatgcggccgccgtgcaattgcacgatttccttgcacagcgccagccccaggccggcgccgcctttcttgcggcccacctggacaaagggttcgaagatccgtccctgctgcccataggcgatgccttcgccgttatcctcgacgctgacgatcactcgctcgccatggcgccgtgcctgcaggcgtatctgcccgcccgcgggagtgtggcgcagggcgttgcccagtagattgtcgagcacccgctccagttggacttggtccgcatatagccgaggcaggtcggattgggcttccaccagcagttcgatattttgcgcgttggctggctcggcgaagcgtgctcgggcgtgttcgagcagatcggtgacgtcgcacggccccagcgtgagtttctgcagtccattctgatagcgcgaaaagttgagcaggtcgttgatcaactgcatcaagcgctgcatctcttcattgacggtatccagcaagtccgcttcgcgggactccgccgggaacttcgcacgctcgcggaacagcccgaaggccatatgcatgccggtcaccggcgtacgcagctcatgggaggcgcgcaatacgaactcgctgcgcacccgctcgaaggcgcgttgttcggttacgtcgtgcagcaccatcactgcgccaagaatatgcccctgggtatggctcaccggggtcaggctgtaggtcagcagacgcagttcgccctcgacctccacttccaggtcgtccggcgcgcgctccaggttgccgccgcgcagcaccagttgcagttgttcatccagctccggacgcgacaaggcttcgcccaggccttggccgaggcgctcctcgtcccaacccagttggcgctgggccacagggttgaggtgctccaggcgaccttggcggtcaatcatcagtaagccatcgtcgatgctgtcgagcacggcctgcaggcgctgctggccggccagcagttcatcgacattggtcgcctgatgctggcgcagcgcctcggccatgatgccgaagcggcgggtcagctggttcatttccgctgccgaggagatcggcagcgttacctcaaaatccccttgtccgattttatctgccgctttggccagtgcttcgattggtccaccaaaacgccgggcgatgccatgggccgtcacaaatccgatgatcagtacagcaagccccaccaaccccagcaaaccggcgatccacaacgcgcgttcgcgggacttgtgctcgctgttgctgatgttttccaaggcctgcttgtgttcggcgatcaggccattgcgcagcgtgttgaaggtgtcggtgagtttgtccttggcgccgggtggtggcgtcggttgctgggactcgtcaaaggcctcaagcagcgcctgatactggcctcgagcctggctgaagcccgttccgcgaccgtcacgctgttcatgggcaataccctgatccagcaggtcgaagtagcgctgtttcgaggtttgcagcgcctcggggtccgggcgctcctccagcatcatgatcaactgatcgcccaggctctgacgcagcttgaggcccaggtccagagtgacgaagttgctgcgaatcagagactcctgggtcttggccatttgcatgacgctcaccagacccaggatcagacccaacagggcgacggtaatcagcgctgagatgctcaggaataaccgagtgcgcaacttcatcgctagcttcatagggtacagctcacaggttgtactgtttgcgtttgcggtacagggtcgacgcgtcgatgcccagggtgcgggccgcctgatccagggtgtcgctggtagcgagcacggcgcctatatgggctttctccaactggtccaggctgagtgccgcgccaatccgtggggcattgttgctaggttgttcggacatccccaggtggctgatttccaccttctcttgcgggcaaatgatgctggcgcgctccaccacgttgcgcagttcgcgaatgttgcccggccagcggtagttgagcagcgcttcacgcgcttcatcgctgaaaccccgtgctggacgggcatattccttgacgaagcgcgccaggaaccggtcggccaaggtcaggatgtcttcactgcgctcgcgcaacggcggtagatgcaaagtgatcacgttgaggcggtacagcaagtcttcacggaagcggccgtcgcgcaccatgtcttccaagttcaggttggtggcggcgagaatgcgcacatcggcacggcgggtgacggggtcacccacacgctcgtactccttgtcctggataaaccgcagcaacttgggttgcaaggtgaggggaaagtcgccgatctcatcgagaaacagcgtgccgccgtccgcttggttgacgcggcccagggtactttcactggcgccggtaaacgcccctcggctatggccgaacagttcgctttccatcagttctgccgtcagcgacgggcagttaatggtcacgcaggattttttcgagcgcttgctccaaccgtgaatagcgcgggccagttcacctttaccggtaccggactcgcccagaatcagaatgttggcgtctgtcccggccacctggcgcgccgtttccagcaccaccatcattgatgggctgtgagagtcgaggccgtctttcggctggcgcacttcgccctccagggcttcgagccgcgcagacagttggcgcacttccaactgcttggcggtggccaggcgcagttgatcggggctgcagggttttaccaggtagtcagcggcgccggcctggatagcatcgacggcggtatcgactgccgaatgggcggtgacgatcaccacgcgcatccagggcgcctggattcgcatctgggccagcacatccaggccattgtcttcgcccaggcgcaagtccaggaagcacaggtcgaatacctggcgttgcatcaaggcgtcggcctgggccgcgctgttcgcagtggcgacggtgtagccttcatcttccaggcaataacggaaggtgcggaggatcgcggactcatcgtccactaaaagaatgcggccttgaagttccttggctgattccatctgtcccgcgctccttaaactatgaatgatggtgtttagtcccggaataatcgggcaagttgcatggtttattctgatcgataaatagcagtctcgtgcaggtatctgcatcacttcctacaaagccccgtctgatggcgttttcatgccgtcttgccacttcggcaacaccctcttcgttttctatccctcgacccgaccgctggccatcgtgcatttcgcacggcatacacggaggcatcgtgcaggatgctggagggtgcatgagtctttagttcataactatctgattttattgagttttattttgtaaaaaaactggcacgcactctgcaatagctcttccaacgaataatcaaaatgcgggagaacaacagcatgactcgccaaagcctcagcgaactgcgtgtatcgccactgcgcttgcagcaaggtctgtttgccagcttggccctgatggtcacgctgatcggtggccagcagttgcaacattggcagcagagtcagcagcagatcccccagtttgaacgtccggccatgacccagacccatttccgttccgttggcagtgttgctgccgatgcaacagccccgcaattgcggatggttgaccaggcgtcgcccctgagtgagctgccatcccaagagcgttgggtgttctaggcaccaaaggccgcttgtgttgagcggcagcacggcaccacccctgttatttctatagatgcgtaaggagaatcaccatgttgagttgggcaatcacatttctgatcatcgccattgtggctgcagtcctgggcttcggtggtatcgcgggcaccgccacgggtatcgcaaaaattctgtttgtggttttcctggtgatgttcatcgcttccttcttctttggtcgtcgcggccgaggctgaaaatgaccactttgtccttcaaagccattactgccgccctgcttctgggcggtagcggcttggcgttggccgccaacgacggccagtcccgagccaacgaattgctgagcgcggacccgcaataccgtgaaacctggcaagacgtggtgaagaaagaagagcgcctgccggaatgggtgatgaacctgtccggcgccgccgagcagatgaatgccgtggaagaagatggcgacaagtatttggtcgggccactctgcgaaaccgctgacacctgcctgaacaagcgcctgatcgttgccttcagtctcgacaaagaagatgcctacgccatgttggtggaagtcccggccggtctgccgaaggacaagtcgccgacgcggcacgccgattaccggtttatcggtaagccggatgaaggcatgcaaaagctgctgatggagcagctgaagaaagatccgaattggtactaggttccgtctgacacgcttgttgtctgcggggccggcgtccatagaaagaagccgtcgcttctttctgtttgcaccgctcgccaagggtggtgcatgaccaaggggccgggttgctctgatcacctgcgatcggcgtgacctacgggtacagggagtgcctgcgcaagggccgggtcaggcaaaaagctgcggcgcaggttcacaagccaacggcttgctgaacttgcgacgggctttaacgctccttctctgcttctcatgccgcccgtagtcgtgatttccttttttgcttgtgcccaaccattacttggtgtgtcgggtagaccatctatcgataaaatttggtgggcgccataggacatttccgacactaaactgtggaattctcaggcatttccgccaacgctccgcagacgtcctgaatctctgagcgagccgggtttggccggttcacggcatttttgtcggacaaaatgtcacatttgaactgaccgttcggacagttattattaaaaaatctcatgccgattcggcatagggtaggcgtttacggcattagacgtcgcccccttgcatgggaatagttgcgccttttttcgcctgccagtaagccatttcggccacgctgcggtgaccttccatggaggcagatgcacacactttttcgctctcgagcgttgcggctggcgcatttgccttaagttcacttgaagtaagggtaatgacatgaagaaggcaaagctaagcctcgcctggcagatcctcatcggtttggtgctggggatcgcaatcggtgcagtgcttaaccatttcagtgctgaaaaggcctggtggatcagcaatgtgttgcagccagcgggcgatatctttatccgcctgatcaagatgatcgtgatcccgattgtgatttcctcgctgatcgtcggcatcgccggtgtcggtgacgcgaagaaactcgggcgcatcggcgtcaagactatcctttacttcgagatcgtcaccaccatcgctatcgtggtcggcctgctgctggccaacctgttccacccgggcgcgggtatcgacatgagtaccctgggtaccgtcgacatctccaagtacaccgccaccgccgccgaagtgcagcatgagcatgcgttcatccagaccatcctcaacctgatcccgtcgaacatctttgccgccgtcgcccgtggcgagatgctgccgatcatcttcttctcggtgctgttcggccttggtttgtcgagcctcaagcctgagctgcgtgagcctctggtaaccatgttccagggcgtgtccgagagcatgttcaaagtcacccacatgatcatgaagtacgcccccatcggcgtgttcgcactgatcgcggtgaccgtcgccaacttcggcttcgcctcgctgctgccactggccaagctggtgatcctggtttacgtcgccatcctgttcttcgcttttgtgatcctcggcctgattgcccgcctgttcggcttctcggtgatcaagctgatgcgcatcttcaaggatgagctggtactggcctactccactgccagttccgaaaccgtgttgccgcgtgtgatcgagaagatggaagcctacggcgcgccgaaagccatttgcagtttcgtggtgccgaccggttactcgttcaacctcgacggttcgaccctgtaccagagcatcgcggcgatcttcattgcccagctgtatggcatcgacctgtcgatcggccagcaactgatgctggtgctgaccctgatggtcacctccaagggcatcgccggcgtaccgggtgtgtccttcgtagtgctgctggccaccctgggcagcgtgggcattccgctggaaggcctggcgttcatcgctggtgtcgaccgcatcatggacatggcgcgcaccgccctgaacgtgatcggcaacgccctggccgtgctggtgatctcccgttgggaaggtatgtacgacgacgccaagggcgagcgctactggaactcgctgccgcactggcgtaccaagaccgccgcaccggtcgcccaggccacccgcagctgacagcgtgacggcttaaagacaaaccccggaaaattccggggtttgtcgtttctgccagccccgctatcattcgccccattcttcgggggattcaactgatgctcaatggcctgtggcttggcttctttgtcgtggcaatggtgtcggcactggcgcaatggctggtcggcggtaacgccgggatttttgcagcgatggtcgaaagcattttcgccatggccaaattgtcggtggaagtcatggtgctgctgttcggcaccctgacgttgtggctgggctttctgcgcatcgccgaaaaggccgggatcgtcgattggctggccaaggccctcggcccgctgttccgccgcctgatgccggaagtgcccgccggccacccggcgatcggcttgatcaccctcaactttgccgccaacggcctgggcctggataacgccgccacccccatcggcctcaaggccatgaaggcgttgcaggagcttaaccccatacccaacaccgccagtaacgcgcagatcctgttcctggtgctcaacgcgtcgtcgctgacgctgttgccggtgaccatcttcatgtaccgcgctcagcaaggtgccgccgacccgacgctggtgttcctgccgattctgctggccaccagcgcatccacgctggtggggctgctctcggtggcgatcatgcagcgcctgcggctatgggacccggtggtgctggcgtacctgattccgggtgcgttggtattgggcggctttatggcgctgctcgcgaccctctccgccacggcgctggccgggctgtcctcgatcctcggcaacctcacattgtttggcctgatcatgctgttcctggggatcggtgcgctgcgcaaggtcaaggtgtacgaggcgtttgtagaaggcgccaaggaaggctttgacgtagccaagaacctgctgccgtacctggtggcgatgctttgcgccgtgggggtgttgcgagcctctggcgcgttggattttggcctggaaggcattcgccatgtggtcggctggacgggcatggacacgcgctttgtcgatgccttgccgaccgcgatggtcaagccgttctccggcagcgccgcgcgggcgatgttgatcgagaccatgcagacccagggcgtggacagctttccggcgttggtggcggcgacgattcagggcagtaccgagaccaccttctatgtgttggcggtgtactttggttcggtgggtattcagcgggccaggcatgccgtgggctgtgcgttgttggcggagtttgccggcgtcgttgcggcgattgcggtgtgctactggttcttcggttaaggctcggattgctatcgggggcaagccccctcccacatttgaatgtgttcacagatcaacctgtgggagggggcttgcccccgatgaggccctcagtgtttagctgcactattgccttgctgaaccacccactccaccacctgcttattcaactgatcccccgcctgtccaaacccagccaccaccgccggcactttggtgtcccccaccggctggtgcacttcgaaccgtcggctggcaataatccgctgatcacgcccgcgcaccaggcgcgcatccaggcgaatcaccacctccaccacactgccatgatattcactctggaacgcctgcaattgcccgcccagttcatagtcggactgcaggttagtgtcatcggtgctcagcagcgtcacccggccatcgcgctggaagccatccataaagcggttgcgcaacagcaccggcgccgggtcgctccagcgtgagttggcatagctgctgatcaggtcgccattgggcaccacggcgatgcgtgggctgtcgagaaactcgctggtctgcggcttgttcacgcgcagtgaccaactgaccggcgcgccctggctggtggtctgcgccgaagccaggcgatacacgtccgaagggtcagccttgggcagaatcgaacacgcgctcacgagcgccagtgctagaggggcaatcagttggtaagcacgcttcatggcgtgaactccttgttcttgtcgctgcccagcaggtaaccgctggggttggcttccaggcggcgggagatggcgcgcagcgagcctagggtttcgcgcagctcgcgcaccgccggcgccagttcgttgaggccttgcatgccgctgttcaccgagtccttgttgttggtcagcaaggtgttgatggtcgcggtgctttgttcaagggatttcatggcctgctcggcgctgccgaaggcctgcttgccttgttcgttgagcaagccattggcgttgcgcatgagcacggtggtctgttccagggcggcggtcgcctgtttgctcacctgcatcagttgctgcatcaccactttgatatcgccacgctgatcggcaatggcgccagtggtttgctgcaggttctccagggtgttgctcaggcgctcgacgttctcgcgggagaacatgtgattggcgttgtgcaacagcaggttgacgctggtcatcaggtcgttgctgttgttgagcaagcgtgcgatgggcgatggcgaggcgatgatctgcggcaggttgccgtccttgcccttgagctcggggctttgcggggtgccgccgctgagctggatgatcgaggtgccggtgatgccggtcagggcgagcttggcctgggtgtcctccttgaccggcgtctgcccggccaggcggatgcgcgccagcacgcggcgcgggtccttggggtccaggctcaggctgatcacatcgcccaccttgatcccgctgtactgcaccgagctgccctgggacaggccgctgaccgcctcgttgaagatcacttcatagtcctggaaggcgctgtcgacgctggacttggccagccacaggccgaacagcatcgcgccgaccaccacgatcacgctgaacagaccgatcatcacatgatgggctcgggtttccatgtcatacctcgttgagcgattgagcggcatccaatgccgcgcggccacgggggccgtggaaatattcgtggatccatgcgtcgtcggtttccgagacaacatcgatggcatcggccaccagcactttcttttgtgccagcaccgccacgcggtcggtaatggtgtacagcgtgtccaggtcgtgggagaccaggaacacgctcaggcctagcgcatcgcgcagggtcaggatcagttggtcgaattgcgccgcgccgatcgggtcgaggccggcggtgggttcgtcgaggaacagaatgtccgggtccagcgccaacgcgcgggccagggcggcgcgcttgatcatgccgccggacagcgaggccgggtatttgtcggccgccgacagcggcagcccggccagggccagtttgacggcggccaagtgctcggcgtcgcgacggctgaggccggcgtgttcgatcaagggcagcgcaacgttttcggtaacggtcagcgaggaaaacagcgcgcccttctggaacagtacgccaaagcgccgttctaccaaagagcgttcgtgctccggcaagctcggtaggttcttgccgaacacccgcacctcaccttcgctgggacgacgcaggccgacaatgctgcgcaacagcaccgacttgccgctgccggagccgccgaccactgcgaggatctcgcccttgtacaaatccaggtcaaggttttcatgcacgctctggctgccaaagcgattgcacaggccgcgcacttcaatcaccgcctcactgggcgctcggtgtagacggctcaccagcccatctccatgaaaaacagcgcggcgacagcatccatcacgatcaccacaaagatcgattgcaccacgctggaggtggtgtgggcgccgactgattcagcgctgccgctgaccttgaagccttccaggcaaccaatcgcagcgatcaggaacgcaaagatcggcgctttcaccatgcccaccaggaagtgctgcacgccaatgtccgattgcagcagcgagaggaacatcgccggcgaaatatccagggccaccgcgcacaccacgccgccgccgatgatgcccgagagcatcgccaggaacgtcagcatcggcagcgccaccagcagcgccagcacacggggcagtaccagcaactccatcgggtccaggcccagggtgcggatcgcgtcgatttcttcgttggccttcattgagccgatctgtgcggtaaaggcactggcggtgcggccggcgatcaggatggcggtgagcaagacgccgaattcccgtaggaaagagaacgccaccaggtccactgtgaagatcgtcgcaccgaagctcttgagcacggtggcgccgaggaaggctactaccgcacccaccaggaacgtcagcaaagccacgatgggcgcggcatccagtccgacctgttcgaggtgcgcaaccattggcgtcacgcgccagcgcttggggcgcaaaatgctacgggcgaaggtttcgagaatcaggccgacgaaacccaagagtttcttggtgtcctgccagacggtgtccaccgcacggccgatgcgtgcgaggacctggatacccgccgcttcttcaggggctttttccggcacgcaaaaatcattcagggaacggtagacggtcttgagcagcgcgcggtcggcggcagacaagctgcaatcggtttgttcggcggactgctcgatgcgggtcggccccagcagctccaccagcaacgaggcgccggccgtatccagggcgccgaggccgttgaggtcgatgcgcgcgccggcgtcgtattggccgtcgagcttgtccgacagctttttcaggttggcatagtgggcaagcgtccagtcccccgtaatccgcagttgtggtggggtggtggacgtatcgaggtgggctgcgccggccgtcgtgctggtggtcataagctccgagcttgtttggctatccacaattcctacgtaatagcacgatacggcctactttgggttgtccgtttgtgctgagtccgtcaccttgaagcgcagcacgccgatcacttgcccgtcttcggtcagcacccgcacctgccagcggcccacggcgtcggccgggaagttctgcttgtgggtccaggcgcggtagccctctttacgcccgccgtggatatccagggcgatgcggtcgacctcttggccgttgaatttccacacgtggtagatgcgctcatccaggccacgcggcgcgttgatcgcggtataggcatacagcccaccgctgcgcagctgcgcggcagtgacttccttgaggtcgtcgcccggcgtgcggtcctgcagttgggtgctgatggccacttcggtcatccacagggtggctggtggcacccaactgcgcaggagccacccggcgcagccgatggtggcggtgaccccgagcagcatcgcccagcctttgacgctacgcagcggcaagcttaccgccaggcttgggatcgacagtgccatggccacgccgagggccagtttgtaactctcggcggtggtcaggtgcaggatgatcggcaatgccgtgagcagcgcggcgaacagggtcagggtatgcagcgccaggaacagtgagcgcttgggcgccagccacttgtagtacagcgggtcgatgatcgacaccagcgccgccgcgccgagcaagccggtgaataccgattggccgctgttccacgcggtggtgacgaaaaagaacggcagcacaaaaaacagactttcctggtggatcatctgggtcgcgtagcgcagcagcggttcggggatttcgcgcttgaagactttggtgaacagctgggtaaagctgttctccagcatcagccacaaccagctcaccagcatgatcaccgcaatccagctggccatgccctgctggcgatccaccaggatgaagctgcacacacccgagataaaaccgccgagtgcaatcacccctgggtagcgcttcatcagttcgagaacgcgctggattaagtgggtcaggtttggcattcggcgcttcgcagtcttgtaggaaaaatcccagacagaataacgtcttaggccgttgtacggtgggtcattgcacgatccgtttgcgataaacccgcacgccaatcaacacaaaggcgatcagccccagcactccggcgctgatccagctcagcatgtcgtagctgagcagtggtttctcgatgcgccagtaaccgggctgcttgaacacttcgcgcatggcctggttggtctggtccaggctcacggccttgatgcgcttggctgggtcgctgaagtggccgttgttgtattcggcggacgcgctccagtagtagtcggccaaggcgctgttgccttgcacggcccacgcctggcgcgcaatggcggcttgttgcaggcgcgcaaacactgctgggtcgaggccgtccttgagcagtcgggccttgaggtcctggaggacgtgttccgcttcggggaggttttcccgctcaaggtcggcattcaggctgaggaaaccgacgccgccgagtacttcgcgctcgctccagggaccgtaggacaaaccgtgcttgaggcgcagttggcgatacagcgcccagtccaagtagtccttgagcaggtcgtaggtttcatcatgtccgtcatccagcaccggctcggggaacagccagtgcaacttggcgctgttgccgacccagccgtggatcagctcgcgatggctggcagcggcgtgctggatttccggcagcgccggatgctcggtagggtcgaccgggtcgagttggccgtaggtgcgttccaggtaggccggcagcagtttgtcgaggtcgccgacgatgatgagggtcatgttgttgggggcgtaccagtgtgagcgcaggtcgtccagctggtcgcgggtcaggtggtcgacctcagcgcgttcggcgcatttgagccccagttcgacggccaattggttgctggcggtgtggcccaggtcctggcggtccagcaggcgttgcaggtgtgagtagtgaccgccgtcttcgcgctccactacccgcttggccgcgttgatattggcgtcggtcagttcggtgcgggtgatgatcgccagcagcaggtccagcactttgcgctggttttgcgcgggcgcctcgatcacaaaggtggtgtcggcgttgctggtgtaggcgttccactcgccgcccagggcttgcatgcggtcttccagctcggcttcgccgccgccgtcgatgccgctgaatagcaagtgttcgagcaggtgcggcagctctttgtctgcgcagttgaagtcatccaggcctactccgaccaccagacggatggccacatgcccgcgctcggtgcccggtttgagcaacaattgcaggccgttgggcaaggtgtagccctcgacttgcaggcgctcaaaggcaaaggcgtgggcagatcccatgagcaggcaagcgaacaacaggcgacgcataacaagcttcctggcgagtgaggtcatttttaactgacttcacgggccaccgtacgttcagggcgaatgtgtgatgtcggcaatatcttcggcggagagcgcgccggtgtcagacgtttccaacactacataggcactgctgcaaaacaacgagttcaggcgtttcatgtcggcaatcagttccaggtgcagagagctggtttccaggctctggacgatcttgcgctgaaggcggctgacgtgggcgtgggccaggcgccgttcctgggcgcggaagcgacgcttctcgcgcagcaactggcgggcgctttccgggtcggcactgaggaacaccgacaaccccaggcgcaggttggcgatcaactggctgtgcaggccggtgagttcctccaggcccacttcggagaactggcgacgctgagaggttttctgctgctggactttgcgcagcatgcgttcgatcaggtcgccggccagtttaaggttgattgacagttcgatgatctcggcccagcgccgattgtcgtgttcactgaggtcttcccggggcatttgtgccaggtagagtttgatcgcgctgtacagcgcttcgacatcatcgctgaggctgcgcatttcctgggtgatggcggtctgcttgccgcgcagcacttcaagcatggccatgagcatattgtcgatcaggtcgcccaggcgcagggtttcgcgggcagcgttggccagtgccaggctgggtgtggccagcgcggccaggtccaagtggcgtggtttggccttgccattgacctcttcgcgctcaggcagcagccaggcacacaagcgggccatcgggccaatggtcggtaacaggatcaggcaacggctgacgttgtagagcaggtgaaaggtgatgaccatgccttgtgcgctgtagtccaggccatccatccagcgtacgagcgggtcgagcaccgggatgatcagcaacaggccgatcaatttgtacaacaggctgcccagtgccacctggcgtccggcggcgttctgcatgctggtgctgaggaaggccagcacgccgctgccgatgttggcgccgatcaccaggccgatggccacgtgcaggccgatcacaccggcgccggccagtgttgccgtcagcaggacagccgccaggctggagtaggaaatcatcgcgaacagggcgccgaccagggcgtcgagcaggatgtcgccggtcaacgacgcgaagatcactttgacgccctgggcgtgggtaatcggcccggccgcttcaacaatcaattgcagtgcgaggatgatcagcccgaggccgatccccacccggcccaactgccctgctcgcgtttgcttgcgcgacaggaagaaaatcaccccaagaaaaatcagcagcggcgacagccaggacaaatcaaacgtcagcacccgcgccatcagcgcggtaccgacgtcggcgccgagcatggtcgccagggcgggcatcagccccatcaggccctggccgacaaaggaggtgaccagcatcgccgtggcgttgctgctctgcaccatggctgtcaccaggataccggcgataaacgccagccagcgcttggacatgttctgcccgatgacttggcgcaagttggagccgtagacccgcaggatgccggtacggacgatgtgcgtgccccagataagcagggtcacggcggaaagcagattgagcaaggtcagcatgctcggccccccgtgtgggtgcgctcgaaaatgagcgaaggaaagttgccgcgtgccgctctacgtcttgtacttaagctgtagttggcgaatgggttcggcgccagcatcgcatagctaaagtggggattgaaataaaactgtcatgaaatcagctttgtgcggatgaaaaaaaggggcctgtgcaggccccttttttgtctggctcgggattattgacccgggatgtctttgcgcagtttcacaggatcctgctgtttcttctttttcgcgatggcggtgcgcatcttgatgttcactgcttccaccgccagcgagaacgccatggcgaagtagacgtagccttttggcacgtgcacgtcgaaggattcggcgatcagcacggtaccgactaccagcaggaacgacagcgcgagcatcttcaacgacgggtgcttgtcgatgaattcgctgatggtgccggctgccagcatcatcaccaataccgccacgacaatcgccgcgaccatcaccggtacatgggagaccatgccgaccgcggtgatgaccgagtccagggagaacacgatgtcgatgatcgcgatctggatgatggtgtagatgaacttgccaccggcgcccttcggctcgtcgtgggtttcgtcttcaccttccagcgcgtggtacatctcctgggagcttttccacagcaggaacaggccaccgaagaacaggatcaggtcgcgcccggaaatgccttggccgaagaccacgaacaggtcggcggtcagttgcatcacccaggtgatcgacagcagcaacaggatgcgtgtgaccatggccagggccaggccgaagatccgggtgcgtgcctgcatgtgcttgggcatgcggctgaccaggatcgaaatcatgatgatgttatcgatgcccaggacgatctcgagggccgtcagggtgaagaaggcaatccagatttccggattggtcagccattccatgtgtattcctttgagcgagtgttaaaccgcgcaagctgcagcgccgcgcggttgggtgttcgggattatagagtgctgaacagaggaataatccccatcagcaaagcggcgaccattatgcacaggcataccagcactgcccacttgagggtgaagcgctggtgatcgccaaattcgatacctgccaaagcgaccagcaggtaggtcgaaggtaccagtgggctcaacaggtgcaccggttgtccgacgatcgatgcacgtcccatttctgcagccgtgatgccgtagtggctggcggcttcggcgagtactggcaatacgccgtagtagaacgcatcgttggacatgaagaaggtaaacggcatgctcaccagcgcggtgatcaccgccaggtacgggcccagcgcgtcagggataacggccagcaggctcttggacatggcatcgaccatgccggtgcccgacaggatgccggtgaagataccggccgcgaagatcagccccaccaccgccagtacgctgccggagtgggcggcgacgcggtctttttgcatctgcaggcatgggtagttgacgatcatcgcgatactgaatgccaccatgaacagcaccggcagtggcaacaggccggcgatcagtgtgcacatcagggcaaaggtcagggcaccgttgaaccagatcagtttcgggcgacgggcgtccgggaattgcgacacgctgatttcgctgtggtcgatctcgtcgccttgcaggtgcaattcacccaggcgtgcacgttcgcgcaggccgtacatgtaggcaatcaccaggattgcgacgacgccggcggccatggccgggatcatcggcacgaaaatgtccgacgggtccacgtgcagcgcgctggcggcacgggcggtcgggccaccccaaggggtcatgttcatcacgccaccggcaagaatgatcaggccggccatgatccgtgggctcatgccgatgcgctggtacagcggcaacatggcggccacgcagatcatgtaggtggtggcgccgtcaccgtcgagggacaccaccagggccagtacggcggtgccgaccgagactttcagcgggtcgcccttgaccatcttgagaatcttgcgcacggccgggtcgaacaggccggagtcgatcatcagggcaaagtacagaatggcgaacatcagcatcacgccggtgggcgcaagcttggtgataccggccagcatcatcgggccgatctcgggcgcgaagccaccgaacagcgcgaacaggatcggcacgatgatcagggcgatcagcgcggacaggcgcttggtcatgatcaggaacatgaacgtgatgaccatggcaaagccaaggaaagtcagcataggaatactccaggcgtagcgcggctagggaatggcgaaccgggtgcggtcagcgcagaacgaaaggcacgaggcgtacgggtggagttggggcgaacaggcgggtacgggcggacatcgggaatcaccattgttgttgttaacagccggtctgttgccggcagtgggggcgatcctagacgggtaagctttcagccagctttcgctgagtaaacgggtgacgaagggaatgcacgcagtctctggacttacatggaccaaaatgtgggagggggcttgcccccgatagcagggtgcaagtcactgcatgcgcaggctgacacaccgctatcgggggcaagccccctcccacatttgtctgtatttggcttgaggtttttagggcagttcgaggccgccggcggctttgtgcagcttgcgcaagtgttcgcccaccagcttgaggttggcttcacaggcggcaatctcggctgaacgcgaaggctccagcagcgccctcacctccttgtccaattcgccggtcagcgattgcagctgcttctggcgttcggcgctttccgattccaggcgtgtggcttccgaaggttgcggcaggccatagccgccgctgccgagcagctcagccgggcgactcaggaagccgctgttggcgaggatctgttgcagcgtggcattggctttctccatgccaccgttcttcagctcgcgagcaccgaggtagcgttgtttgacttcgtcctgggccagcatcaattgcttgcgaaagctcgcctgctccagcagcagcaacgcggcgctggtgcgcaagtcggcctggtcgaaccacgggcgacgctcctcagcgctcagggacagccagtcttcaacctgggtctgcttgatcggcaggtgtttgcgcagcacatcgaacatcgcctggtagcgttcgcggaaggagtcgaagtgatagcccaggcgcaatgccctgcgtttgtcgtccagtacgctggtgtcggccaggccgcgtgcgctcagcacctcaagcaaaccattgggggtgatgttgtccaggccggtcagttgcgggttggcactgccgctgcgtagcagtttcaggctctcgaccgcgcagttgttggagatgaagaagtagttgccgtcgtagctccaatgcatttcggcggcatgctcgacggtatcgttgatttcctggcgggtcagtttcaacggcaccgaggccaggccgcgcagctcggtcttggtgtattcatcgatcacttgcgccagcggcagcacgaacagccgcgaggggtacttgccgaccaggccatcccagctcgacagctgtacgtcaccgacgaacgcgcggtaggacaagaccagatgctggtccaggtccagccggcagtccggcccgcgtgggcgccccggtgcgcagatcaccaggcgcagcatgctgtggccccagcggctgaccaggttctggttggcctcggccagcaggtagtcgatctcgtagacgcgctccgggtccacatggcccagcggtgttttggcaaaatcgttaccggcgttgaggaacgcgtaggtgttggcgcaggtgtcttgctgcggcggggcccagccgaagtgttccttgtaatagcggaacagcgcgggacggcggcaggcgtagctcgggtcgaggagaaagtactccatgttgaccgccacaaattccaacgggctggtggtttcgtagatgtccgggctgcgggcgacttgaagattatgttgctcgcgctctccgcgacggcctacgtactgcggccagccggccaggtccagcaggcgtggatcatcgctcaaggtaaagcggcggccattctggccgcggcattgatcaggcaggccgatcaggccggtgaggttgttctggcggctgcagcggttgatcagcgtgcggtcttccttggaccacaggcgcgcacggtcatagatgtgggtcagttcatgcagcaccgtagcgagcatttcccggcgcacagtgccgtgaggtcgattggttttctgggtggcggcactgccgtcggtcaggctggcgagcaggttgctgttgaggtccagctcggacaccagggaggcttgcccgtaggcgttctcgggcatcttgtcggtccagccgacatcaatgcgtcgatccaactgctcgacaaagcgcggcggcaaggaacgcatcgcttcgtcgagcaatgcctggctcgcctgttgctcagccgggctcaggccctcggtcttgagccgcagttgcaggctggcctgggctgcgccggcacacagcagcacagtcccggccaggagccaggcgacgattcgcctcacagtgcgaggatggcttcggcgagggtctggtcgctggcgtcgcgggcttccggcaggcgtgtgcgcagagtgtcgaaggcggcttcaaggtgggcgccacggatctcgccgttgctggcgacgaaactggcggcgtcatcgtgggcttcgcgtacgactttggagtcacggatggaggtggtggtgtccgaggtgaaatcaatggtgcggccggaggcgcggacaatgatgttactggtggccaccagggtgtgtgcctgggcgatgtcggccaacaacagcaggccgagggtggcggcgatcagcgggctacgcatggaataactccagagacaaagatggaatacagagatgattattggacgagaattgcttgcgccagttcaaggtcgctggcgttaagttttggttggctgcggcgcaaataatccagcgcagattccagccttgcgccccgccattggccgtcagtggcgataaacgcggcagcgtcatcctgggcggccattatcacttttctgtcgaagggtgcagacgtcaccttgctggtggcgtaggcgcttgcgacggtgctctgggtggtcaggtcaaaggccgaagccaacggtgaccaaccgaacgaaaacaacacagggacgattaaaaggcggtatgaaaaagccatgggactcgacaactgaaagcgagcgccaaggctagcgcaatgcccgggcgagagccagcgcccaggcgttcgccttggcgtcagatagccaggatggcctgggccagttgtgcgtcagttgccgtgttcaattgcggcgcgtgctggcggatctgggccagggcgctttccagtttcacgccacggatggcgccttcgctggcgacaaagctggcggcgtcgtcacgggcagcacgtacgaccttgttgtcgcgcagggacgaagttgcatcggagctggcgtcggaagtggccttcagcgcgccgacgatggagtcggtggtcacgatgaagctggtcgcgttggcgttggcagccagggccaacagggtggcagcactcagcaggcgaagacgggacatgggatgactcctatagatgaacggataaggtggcgcaggccagccattggggatcagacgcctgtactgcacggtttgccacagggtggctggatattaagccgccgcttatccgttcgggaagcgccttgactgcctagtcacgccagaacggcttggacagctcggccattcgatcgccctggctgatgccgacatcggacaattcccgggtatcaagctgcgacagttggcgtcgttcataagcgtggcgtacccatttggcgagggttgaggccgtttggcgtagcagtctcttataaagaggggatggcgtatccatggcgagtacctttcctgaggtcttggaacaccatgttgggtgagttggtgagaccgatacagatacaccaagataaaattgtactgtttaactgttgcatttttttaaactgtacctgtcgctgcgcagagcttctgttttctgttggaaattcgaatgccgcaaacaacaaagcccgcctccggtttcccggggcgggctttgttttgacaaatcaggttgctggcagtggacccgtcaggtcagggccagcgagcgctaaatcagcgccagaacggcttgctcagctcttcgtagcgttgagcttcgctgatacctgcgtcagccagcagacgcgaatccaggcgagccagttggtggcggctggagatgcggcgctgccacaacatcaggttggcgataacgcgcagaggcagggaggcctgggtgtttacagctttttcttcgaagaacagttcggaactgagtgtacgttccatgatgacatccttccgcttgtggcgggattaggtagtggtttaactgatgccaatgatcctcttccggcgcaagactctctagatacagttcacctgtattgtgaggggccagttaactgtttataggcgctgtactgtacggaattggggcaactgtacctgtctgcactgaaatagtgcggaataggtgttttcggtgaggtgtgtgggatatttcggtaagaaatgaccggtacagcagtacagttttttcaataagtggcggtgaagccaccgagctgatgagactgtatttgcatcagctcggatctgtatcaatcacgccttgagcatgtgcccggtttcttccaggttgatgtgccaactcagtgcttcgcgcaggatgtgcggggtatgcccgccgatggcgcaggcggcatcgaagtaactgttcagcgcatcgcggtaggcggggtgcacacagttgtcgatgatcacccgagcccgttcccgtggcgccaggccacgcaggtcggccaggccaatctcggtcaccaggatgtcgacgtcatgctcggtgtggtcgacgtggctgaccattggcaccacactggaaattgcgccgcccttggcaatcgacttggtaacgaagatcgccaggtgcgcgttgcgtgcgaaatccccggagccgccaatgccgttcatcatccgcgtgccgcagacatgggtggagttgacgttgccgtagatgtcgaactccagcgcggtgttgatgccaatgatgcccaagcgccgcaccacctcagggtggttggagatctcctgcgggcgtagtaccagcttgtccttatagtgttccaggttgccgaacacatcggcattgcggcgctctgacaaggtgatcgaactgcccgaggcgaaactgagcttgccggcgtcgatcaggtcgaaggtcgaatcctgcaacacttccgaatacatggtcaggtcttcgaatggcgactcgatcaacccgcacatcaccgcgttggctatgttgccgataccggcctgcagcggaccgagcttgttggtcatgcgcccggcgtcgacttcctgcttgagaaagttgatcaggtggttggcgataccttgggtgtcgctgtcgggcggcgtcaccgtagaggcggagtcggcctggttggtgatcacgatggccacgatcttttccggtgggatcgggatcgcggtgctgccgatacggtcatcaactttgaccagcgggatcggcgtgcgcgtcggacgataggtcgggatatagatgtcgtgcaacccttccaggttcgggttgtgcgccaagttgatctcgacgatcacctgtttggcaaaaatcgcgaaactggccgagttgcccacagacgtggtgggcacgatatgcccttgttcagtgatcgccactgcttcaatcaccgcgatgtccggcaacttgagttggttgttgcgcagttgctcgacggtttccgacaagtgctggtcgatgaacatcacttcgccggcgttgattgccctacgcagggtgctgtcgacctggaacggcatgcgtcgtgacagtacgcccgcttcggtcagttgcttgtccaggtcattgcccaggctggcgccggtcatcagggtgattttcagcggcgacgtcttggcgcgttcggccagggcgtgggggacggccttggcttcaccggcacgggtgaagccactcatgccgacggtcatgccgtcctcgatcagtgcggcggcgtctgccgcgctcatgaccttgttcaacaacgaaggcaagcggatgcgatcacggtacatggattcttatctcaggctacggaagcaaggtgcgcagtttagtgatttcaaataatttcggcccgctaccatggtcgaatgccaggtagcgatttagagcctttggtcgggtttcatgcagcaataaaaaaccccagcctatcgcaggccggggtttcgagtattgcgctgaggcagtgttactcgacggctttgaccatgtcttcgataaccttcttggcatcaccgaagaccatcatggtcttgtccaggtagaacagttcgttatccagcccggcataaccactggccatcgagcgcttgttgacgatgatggtcttggctttgaacgcttcgaggatcggcatgccggcaatcggcgagttcgggtcgttcttggcggctgggttgaccacgtcgttcgcgcccagcaccagcaccacgtcggcctggccgaactcggagttgatgtcttccatctcgaacacctggtcgtagggcacttctgcctcggccagtaggacgttcatatggccgggcatacggccggccaccgggtggatcgcgtacttcacggtcacgccacgatgggtcagcttttctgtcagctctttcagcgcatgctgtgcgcgtgccactgccaagccgtagcctggcacgatgatcaccgtgtcggcgttggtcagcaggaaggtcgcgtcatcagccgagccggatttcaccgggcgtgcttctttagagcccgccgcagcacccgcatccggcgcattgccgaaaccgccgagcagcacattaaagaaggagcggttcatcgccttgcacatgatgtacgacaggattgcgccgctggagcccaccagcgagccggcgatgatcagcatcgagttgttcaacgagaaaccgatccccgctgcagcccagcctgagtagctgttaagcatcgacaccaccaccggcatgtcggcgccgccgatcgggatgatgatcagcacacccagcacgaaggctagggccagcatcagggcgaaggcggtgaggttgccggtgagcataaaggccaggccgagaccgagggtcagcaggccgagtaccaggttcagcttgtgctgcccgccgaactgtaccggtgcgccctggaacaggcggaacttgtacttgcccgacagcttgccgaacgcaatcaccgaaccggagaaggtgatggcaccgatggctgcgccaaggaacagttccaggcggttaccggcagggatcgaatcgcccaggtgtttgacgatgcccagggattgcggctcgactacggcggcaatggcgatgaacacggcagccaggccgatcatgctgtgcatgaaggcgaccagctccggcatcttggtcatttctacgcgcttggccatgaccgaaccggcagtgccgccgatcagcaggccgacgatcacgtagccaatgcctgcggtagccagctcagcaccgagcttatagatgaggcccacggtcgtgagcactgccagcgccatgccgagcatgccgaacaggttgccgcgtcgcgaggtggtcgggtgtgacaggcctttaagggcctggataaagcagatcgacgcgatcaagtagagcgtcgtaaccagattcatgctcattacttcggcgcctcttcttttgctttcggggctttcttcttgaacatctcaagcatgcggcgcgtcaccaggaagccaccgaacacgttgaccgctgcgagcgccaccgccagggtacccatggtcttgcccagtggggtcacggtgagcgcagcggcgagcatggcgccgacgatcacgatcgccgaaatcgcgttggtcaccgccatcaatggtgtgtgcagcgcgggcgttacgttccagaccacgtggtaaccgacataaatcgccagcacaaagatgatcaggttgtagataccgggggagataagctcttccatcgtctgaatccctgcttaggcgtttttgcggatgacttggccgtcgcggcacatcaggcacgcggcgacgatgtcgtcttcgaggttgatttcaaactgcccttctttagtgaagaccagcttcaggaagtccagcaggttgcgcgcatacaaggctgacgcatcggcggcgacagcaccggcgaggttggtcgggccgcagatgatcacgccattttccaccaccacctgatcggcgacggtcagcgggcagttgccgccttgtgccgcagcgaggtcgatcaccacggaacccggcttcatctgcgcgacggtttcagcgctgagcaatgtcggcgctttacggccaggaatcagcgcggtggtgatgacgatgtcggcctgcttggcgcgttcatgcacggccagggcctggcgttgcatccagctggagggcatcgggcgagcgtacccgccgacgccgacggcgcattcgcgctcttcgtcggtttcgtaaggcacgtcgacgaacttggcgccgagggattcgatctgctctttaacggccgggcgtacgtcggacgcttcgataacggcacccaggcgtttcgctgtggcaatcgcctgcaagccagcaacacctgcgccgaggatcaatacgcgggcagccttaacggtaccggcggcagtcatcagcatcggcatgaagcgcggatagtggtgagcggcgagcagtaccgccttatagccggcgatgttggcctgggacgacagcacgtcgaggctctgggcccgcgaggtacgtggcgcagcttccagcgcaaaggcagtgatgccctgctcggccagcttgccgatggtttcgttgctgaacggattgagcatgcccaccaacacggtgccgcttttgatcagcgtcagttcgctgtcgctgggggcgaccaccttgagaatcagctcggcgccaaacgcatcgttggcactgccaatggtcgcgcccgccgtttcataggcactgtcgacgatgctggctttgatgcctgctccgctttgtacagtgaccttatggccctggccgatcagcttcttgatggtttccggggtggcagccacccgcgtttcaccggtctgggtttcgagaggaacaccaatgtgcacgtcaaatctcctgcatgatctttttgcttttgatctttttgtaaaaaggccagtgcaccgcgagtggcacaactggggcggccgatcagcacgatcccgctgaaatgacagcggggcgcggcattttgcaggcgaactttacggccttcaagggattatgacgggtgacgaaaaattaactacaagtcaccctgtgactgattgtcgcaacatgccgaaataacctgttcaaatacatgggcttaaagggccgcaggcgtttttgcaatcttttgtcatggttggtgtgaatagtcggctattggctcgtaatagtcgttcaaagccatgtgaatcatggctttgagccgaatttttcctgaaaaatatagtctgcttaaatgcgacatatatatacatctgtaggactgtattattactgactacaaagtcaataatacggctttggcctttaaacattgatgctgtagcgatgtgactggtcaatgagccagtccctgaaagcgtgaagtgaggcagattcgacttttctgtcaggaatcatcaggtaataagccttcgtactgctcagcgcttcggggtttgcaatcaccaattggccctcgtccagttcgcgctggataaggaacggggggatcagtgcgatccccatgtcatgcatggctgcttgggacaacatcgagaatagctcgtaacgggggcctgtcatgtcgcgtgggatgttcaggtgttgggcgttgaaccattggcgccacgcgtagggtcgtgtggtttgctgcaggagcggcagttctgcaatctcctgggcgctgaactgcgcacggtcacccaacagccgagggctgcatacaggtacaggattttcgcccatcagccggtgggactcggtaccggaccagtcggcatcgccgaagtagatggcggcgtcgaattcggtgtcggcaaagaggaaagggcgtgttcgattcgtgaggttgaccgtgacctcagggtgttggcgttggaagtccttgaggcgaggtatcaaccattgagtgccaaaggtcgggactacggccagttcgatggtgttggcgccctgctgccccatgacggaaagcgtatcgcgctccaccgcatccagttgcgtcgccacgcgacggctataggacagccctgcttctgtcagttttaccccgcgccgtgaacggcgaaacagctcgacacttaaaaactcctcgagactagcgatctgtcgacagatggcgccttgagtgatcgaaagctcctgcgcagccttggtgaagctctcgtggcgggctgccgcttcaaagctcaccaacgcggtggtactgggaattttcctgcgcatataccgtgtcctcacttgccaaggcgcatatacgccatttttggctttttcgaagtgagaaattagcacaaccctatgcggaaacctcgtttgccctacgcgattgccgggcctaggctgcttccacgacttccgatttcttccgcgaggacttattcatggctggcaaggcaagcttcaactggatcgatccactgctgctggatcaacagctcaccgaagaagagcgcatggtgcgcgacagtgctgagcaatttgcccaggacaagttggcgccacgcgtgctcgaagctttccgccatgaaaagactgaccctgcgattttccgcgagatgggcgagaccggcctgctcggcgcgatgattcccgagcagtacggtggcagtggcttgaattacgtcagttatgggttgattgcgcgtgaggtggagcgtgtcgactcgggctatcgttcgatgatgagtgtgcagtcgtcactggtcatggtgccgatcaatgaattcggcaccgaggcgcagaagcagaagtacctgccgaagttggcctctggtgaatggatcggttgttttggtctgacagagcctaaccacggttccgaccctggcgcgatgatcactcgtgcccgcaaggtagagggtgggtacagcctgacgggcgcaaagatgtggatcaccaatagcccgatcgcggatgtatttgtggtgtggggcaaggacgatgctggcgacatccgtggttttgtcctggagaaaggctggaagggtctgagcgctccggcgattcacggtaaggtcgggctgcgcgcctccattactggtgaaatcgtcatggacaacgtgttcgtgccggaagagaacatcttcccggacgtgcgcggcttgaaggggcctttcacttgccttaactctgcacgctatggcatctcctggggcgcgttgggggcagccgagttctgctggcacaccgctcgccagtacacgcttgatcgccaacagttcggccgtccattggcggcgactcagttgatccagaagaagctggcagacatgcagaccgagatcaccctggctctgcagggctgtctgcgcctggggcgcatgaaggacgaaggtacggcggcggttgagatcacttccatcatgaagcgtaactcgtgcggcaaatccctggatatcgcacgcatggccagggacatgttgggcggcaatggtatttccgacgagttcggggtggcgcgtcatctggtcaacctcgaggtggtcaacacctatgagggtactcatgacgtgcacgccttgattctggggcgcgcgcagaccggtcttcaggcgttctattaataggagcacggcatgggcgcgctttcgcatctgcgggtgctggatttatcgcgagtactggcgggcccttggtccgggcagatccttgcggaccttggggctgaggtgatcaaggtcgagcggccgggcagcggcgatgatacgcgcgcctgggggccgcccttccttaaggatgcctatggtgagaacaccagtgaggcggcgtattacctgtcggccaatcgcaataaggagtcggtgacaatcgacttcacgcggcctgagggacaggcgctggtgcgtgagctggcggccaagtcggacatcctgatcgagaatttcaaggtgggtggtctcgcggcttacgggctggactatgaatccctcaaggagatcaacccggagctgatctactgctcgattacagggtttggacagaccggtccctatgcggcgcgtgctggttatgacttcatgattcagggcctgggcgggcttatgagtctgactggccgtccggagggagaagacggtgcagggccggtgaaggtgggggtggcactgactgacatcctcacggggctttactcgaccgtggcgatattggcggcactggctcatcgggatcatgatggaggcgggcagcatatcgatatggcattgctggatgtacaggtggcatgcctggccaaccaggcgatgaattacctgacgacgggtgtgccaccaaagcgtctgggtaacgcccatccgaatatcgtgccttaccaggactttcccacggccgatggcgacttcatcctgacggtgggtaatgacgggcagttccgcaagtttgctgaagtggctgggcagccacagtgggcagttgatccgcgcttctctactaataaggtgcgggtggccaatcgggcggagctgattcctctgatacgtcaggctacggtgttcaagacgacggcggagtgggtgtcgcagttggagcgggtgggtgtgccttgtgggccgatcaatgatctggcgcaggtgtttgccgatcctcaggtgaaggcgcgcgggctggcgatggcgctgcctcattcgttggcagggatggtgcctcaggttgccagtccgataaggttgtccaagacgccggtggagtaccgtagtgcgcctcctctgctgggagagcatacggccaaggtgcttcaggaagtattggggttgggggtggcgaatgtggtcgcattgaaggctgcgggcgtcatctgaatcctatcttctatatagagggcgttaacggcactttattggtggttttttaatcaatgctaactaattgatagaaaagcaaaattaagggttgacggcagattctggaagtctataattcgccccacttccggcgcagtcgaaacggaaaactccttggtaaacaaagagttacgcagaattcgacagcgacttgcttcagttcatcgaagcccagaaggagttggtagagcagtgttgtctggctctattaacgtttcgatcctctcggtcgaaagcggagaaaaagaggtgttgacagcagcgtgtaacgctgtagaattcgcctcccgctaacgagagatcggaagcgcaagtggttgaagttgttgaagaaatcttcgaaaacttctgaaaataatcacttgacagcaaatgaggctgctgtagaatgcgcgcctcggttgagacgaaagatcttaaccaaccgctctttaacaactgaatcaagcaattcgtgtgggtgcttgtggagtcagactgatagtcaacaagattatcagcatcacaagttactccgcgagaaatcaaagatgtaaccaacgattgctgagccaagtttagggtttcttaaaaacccaaagatgtttgaactgaagagtttgatcatggctcagattgaacgctggcggcaggc

SEQ ID NO: 60 - DNA, 62888 bp, Pseudomonas nodulensis
attggaaccacctgatcccatcccgaactcagtagtgaaacgatgcatcgccgatggtagtgtggggtttccccatgtgagagtaggtcatcgtcaagattaaattccagaacccctgactgctaacgcagtcaggggttttgtttatgtagaagtccatgaatttcatcggcacgttgctaacccaacggtccggtacacagaatttcttgacgaccatagagcattggaaccacctgatcccatcccgaactcagcagtgaaacgatgcatcgccgatggtagtgtggggtttccccatgtgagagtaggtcatcgtcaagatttaattccgaaacccctgtctgctaacgcagacaggggttttgtcgtttggggccataagtcaccacaatttgtcgtttcctcacacatgcctaccgctggtcagtttcctgcttaaaaatcagaaacatcccacaattttctaagctttgccgcggcttggccgaaagcctgacgagccatgcgtgcaccgaaatagagcggccccagaagctgcctataccgttacatggaatttttcacccggcacgctcacccccctttggcaaaagaagtcgatgaaatgaatctcaagttcagtcataaaattctgttggccgcgtcaggcgtcgtggttctggccttcgcgttattcaccctctacaacgactacctgcagcgcagcacgatcaagcagaacctggagtcgtccatccagcaatccggtgaactcactgccagcagtgtgcagaactggcttagtggccgaatattggtactcgaaagccttacgcaaaacgttgctcaccaaggcagtggtgccgaccttcctggcctggtcgatcagccagcgttcactgataacttccagttcacctatgttggccaaaccaatggtgtgtttacccaacgtcctgacgcaaaaatgcccgatggctacgacccccgtcagcgcccctggtacaaacaggcagtagctgcagacaaacccatgcttacgccaccctatatggcagcggtgggtgggcagatcgtgaccatcgccatgccggtgaaaaagaacggcgagttgctcggtgtggtcggcggtgacctgagcctgcagaccttggtgaagatcattaactcggtggattttggcggcattggccatgcgttcctggtcagtggcgacgggcaagtcatcgtcagtcccgatcaggaccaggtgatgaaaaacctcaaggacatctaccccggcacccaagtgcgcatcgagaaggtcagtcaggacgtcgttctcaatggccaggaccgaatcttgtcattcacccctatcagcggcttgccaggcgcggattggtatatcggcctgtcgattgataaagacaaagcctacgcaccgctgggcaaattccggacatctgcgttgattgccatgttgatcgccgtggttgcgattgccgtgctcctgagcttgctgattcaagtcttgctgcgacccctgaccactatgggcgtggcgatgcaggatatcgcccagggcgagggtgacctgacccgtcgtctggcggtcaccagcaaggacgaatttggcgaagtcggcagtgcgttcaatcagttcgtagagcgcatccatgcgtcgatttcggaagtgtcctcggctacgcgccaggtgcatgacttgtcccagcgtgtgatggcttcgtccaatgcgtctatcgtcggttccgacgagcaaagcgcgcgcactaacagcgtcgccgcagcgatcaatgaactgggtgccgccacccaggaaatcgcgcgcaacgccgccgatgcgtcacaacacgccagtggtgccagcgagcaggccgacgatggccgcaaagtggtcgagcagaccatccttgccatgtcggagttgtcgcagaagatcagcttgtcctgcacccagattgaaaccctgaacgccagcaccgacaacatcggtcacatccttgatgtgatcaaaggcatctcccagcaaaccaacttgctggcgcttaacgctgccatcgaggcggcccgagccggtgaggccgggcgaggctttgcggtggtcgccgacgaggtacgtaacctcgctcaccgcacccaggagtcagccgaggagatccacaaaatgatcacttcgctgcaagtgggctcgcgtgaagcggtgactaccatgaatgccagccaggcctccagcgaggaaagcgtagaggtcgcgaaccaggccggtgagcgcctggtcagcgtgacccagcgaatcgttgagatcgacggcatgaaccagtccgtcgccgcagccactgaagagcagacggccgtggtggaaaccctcaatgtggacatcaaccagatcaacttgctgaaccagcagggcgtggccaatctcaatgaaaccctgaaggattgcgatgccctgtcgcagcaggccaatcgtttgaagcagttggtcgatagcttcaagatctgacccgctgattcattggcaggggcgcatcgcgtcgctcctgccgcttagctgagtattcggcggacattgtccagggcgctgttggcgaagtcttgcacaaactgttcgaaccctgtgttcgccgtctctgtgggctctgcaataattgtccacatcaccttggagcgctccgcttcaagtgcttccacttggatcgccgcccatagtctggccacacccagggtgttgtagatcgtggtccaggtcatgtgcatagcctgttcattccggctattgagttgctccactacacaattgccatcgcggaagaattttgtccgcaaggcgcccacgcctgagcccatcatttcgatatggctcaagtccggaatgaacatatcgaagccggcaaatcgccccaccatgtcccacaggcgagaggcggaacagttgaccacaacagaagccactatcggtagaccactcgggttgcggattaacgtatcgggttgcagcagtttcatgaggttgtcctggggtgttcaaagaaagccgatggccttgaggtaattgcagcctttgctcaacagtgccgtgtcctttgcggggtagtgttcacccatctgctggacacctagtcgcgcgttgtcgtaacgaatcattgaagtgtccccgatgtcttcgtcgaggcggtcgaggtaaaaaccgagcacgccaaacagtgcgttgtcctggcttaccgttcgcagcgcctgctgccattgcgcgatgcccactcgcttgaagcgatggcccgcccgactgaacgcatccaggtagtgcgcccagctcaacggttgtgggttatgcaggttgaacacactccggctggcatgaaagcgggtgctgtggaatgcaatgaagcgcgccagaaagtccaccggcatcaggtcgaagttcagcgccaaacggggcagcaggcccagctgcagtgaccccttgagcatcagcatcaggcgatttttttgcggctggcacgcaccgttctggctgttgaagctgatattgccgggacgatggatattcacccaggcaccacgcgccaccgcatgccccaattgccgctccgcaacccatttggataggttgtagccattcttgatgtacagcggcagcgtggtagaggcgggtgattcgaggacatagccctgcgagtcgacactgctcgaggccgacagtgtcgagataaagttgaagactttcttgcggtgggtttcacacaagcgcaggcattcgcgtatggggtcaacgttgtcccgcgtcagtgatgcatagtccatcacgtgattgacccgcgccgcgttgtggaccagcacgccgaagtctctggcgagagactcatacacaacgtcagccaggcccaatcgaggttggctgatatcggccgtatataccttcactcggctcaggtccacatgctccaggcggtattcatgtagcgcctggatgagtcgtgacattggcgaccgccccggctcctcccgtaccaggcacgccacctcggttgcaccagcggccagtaacgcttcgacgatatggacacccacaaagctgttggctccggtcacgatcactttgtgcggatcacctgcacggtcctcaggcaacgtgtcgagcacccactccgattgagcatcacgggccgcgcggccagatcctgcatcgggtcgttcaccgttctccaccagcgttgcgagcgtacgaatcgtcggcacttcaataaagtgactcaacacaaagctacggccgaactgctcgcgtacgcgcagcagcaaggtcgatagcaaaatcgaatgcccgccgagatcaaagaagctctggtcaatagatagattacctgcgggcaccgccagcaactcgctccacaagcgggacaaccgaaggtgaagcggagtttttgcggtactgccgacagcttgcaacgcagaccggaccggtagtgccagcaatgcctgccggtcgacttttccattgacggagcacggcaggtagggcaagacctcccagaagcccggctgcatgtagtctggcagccattgccgtgcatggtgcttcagggcggccacgctcgcgtgtggttcaggctgggcgacgtagccgcggatcctgctgtcccggtcgattactaccgccacctggcgatacagccgactatcgcgcagacactgctcaatctcctgcggctcgacccgaaaaccgcgaattttcacttggtcatcgcgccgcccacccagcacgatcccgtcggcggtccaccgtgccaggtcgccactgcggtaggcccgcagtggcggagctcctggtattgccagttccacgaaaggactggcacgcggctgcgacgtgcccacataccccaggctgactccggggccgacaatgtacacctcgcccattacctcttcatccaccggttgcagagcgtcatcgaggatcagcacctggctgttggcgatggggtagccgaggttgcggttgcagtcaccggggtgcagtgtccgctgggtgatcagcaccgtggtctccgtagggccgtagaggttgtgaaaccggcactgcccggccaggcgttcgatgacatggggttcgcacacatcgccgccggtcagcaggtgcgtcaggcccaatggttgatcaagcggcagaatgctcagcagcgcaggcggcaaaaaggcatgggtgacgtgctgctggtggagcaaacccagcagttgttcaggggctcgccgttgctcggcactggggacgatcaattcggcacccgctatcagggcagggaaaatatcgatcagcgatgaatcgaagctcaacgacgaaaactgcaggactcggctctggtcatccaggttcataaaggagctgaaccaggccgtgaaatgcgccaggtttgcctggctgagcagcacgcccctgggttggcctgtggagcccgacgtaaagagcgtcatgcagggcgcatcagggtgggggcgagctggcatcaacgcaagcgtgaggtcgacatgccgaaggtcaggacgggtgacatccagcgcagtgaagtgcgctcgcaaaggatgttggccggcgtccagcaacacacgcgccccggcggtctcgagcatgacttgatggcgttgtggcgggtggtccgggcccagcggcagatacaccgccccacagcccagcaccgcaaggatactggcgtacaactcgatggatttttccaggcacacgccaaccacgggcggggcctgcgtattgcccaacaaggggggtaactgttgctggatcgtgagggcctggacgtgcagctcgcggtaagtcactacgctaccggcgatcctcagcgccggtcgatccgcaaacctatggaggctcgcctgcaccctttcgatcacgggcacttgggcttcgcgcattaccgcgggatcttcggtacggttgaatcgatggacaaatgccagcgcatcaagcgcgtccaacccgtgctctggccagtcattggcaacggcactctcggagaaatacccagggtcccgcgagaaacgactgacgtgcagcgcgacccattccaccaatgcgtggctcacttgctggcgtaaccgttgcccgttgcccgtgggctcttcggcgatgtccagggctcccgacaagcgccggttggccccataggcgcgcagctgcagcgggggtagtccgcagtcggataccgggccaacgcccaggcgcaggctcaacgcagagattgggtctgccgggtcccgcagcggctgacatccgtcatctatccacaggtcgacgccttcatcgctcgagacatgcccatgctgttccagctcccgtctgatggcgtccaaggcgctgctggcaccggaaaatccgattgtcaggcgcttcatgtcgcttccccgggcatcggcaaatagtctttcaacgcgtgcaccacactcggcgtctgcagcaaaccgctgtgttgcaggaagccaaggatattgctcaacagcgggtgccggcgagtgatcgggaaggtgagcgcggcgatttcattgcgcaacgcgttgcgcaggctggcgtcgatatcgaggtgttcgatcaagtgaaggtcaaagtctttttgcagatcgttcgtcagatactgagccaggaacgccggcagtaccttggcaatactgtcgcgatcgtccgcgttcgcggcttgccaatacaggcgtacaagtcgcgtccagaattgcgcgtggcggccttcatcaaacaggtggtcggccatcaagccacggatggaggctttgacactgctgtccttggagaatgccgctacatcatgggtcaccgtgttttcggcgatggccaccgcaatcagttctactgcatcgtgcagatgggctggcgcctgggcttgtgctgtcggcagtgcgcggctcaattcgatttgcctgggcagctccaacggctgtatgccggtcatggccacggtttgctgcaggaaatccagtgcgaccagcgcgtggtagtcctcgtccacgacgacggtcatcgcatcaacgcggcaggccagcgggaaggggatcgagaagcggttcttggcaatgctgcgcgcagtcttgtcgacgatctcggtctcgaatatcaccacgtcgttgatgaacttgtagaagctctgcaccagcacgaaatcgcgccactgcgggcagtgttcgagaaaggtcgcgctgagtaccaagggctggcggcacagtgggtaaatcagcttgtcatcgttttccagtaagcggcgaggacgtgtacggatggttgcacggcgctcccagtcgtcggcaatggatgtgtagtcgccggtgttcatggacgcacctcttgcaacgaggcctgaacctcatcccagagcgcgatacggccttccatggcggcaagggctgcgtcgtgggcctgttgcgcgtgcgccgggtcagcgctgacgaggcgttcgagcagctgctcggcggccggcccatggtcctgggtgtccatctcgatgtgacgcttgaggtaagcgcgcaaggtaggcgcctggcgatggatgagttcattggattgcaggatgcgctggaacattgccgggatgacgtgctcgcgtccgtgcaggaaggttgcagccacacagtgggtcggtgcattcagcgcgaggttcaaggtgtcgctgacgaagcgaaccacgccaggaagaacctcgacttcctgtaaggccgcgtgtgcttccaggccttggcgttgcagtgtaataaagtggttgatagacgcggtgttggcacccacttctgccatcgcctccaagtacagttcgaagtggctgcaataacctttcgcgggatgttcgtctgactcctcgcctaatacgatctcgttgatcagacgtgcggcctgcgggtctggcggtggcagccaaggcaggcgcgtacaggtcaaatcctgttgcaggcgtttggcgagggtcatgaagtcccagactgcaaatacatggctttccatgaaaagttgtaactttcgtacggaagttgtttctgaaaataacgaatgactgcataactgcagttttgctgtttcaagtaacggttgatgcatggttgatgcctatgagttgttgcgtctgctgtgtaagcagcgatgaattttttgtggttggcaagggctcagctgttgttaaaaggctgctggcgtgcgggatcgctgaatgtgaaggatgtcggggctgttaataaaatataataagcgggttaaacaagttggcgaacatacaaatatgttagaagtttttctaaataatattgatgtaagttggattctttgttgtaagtgggaagtttccttggggcgacgcgctaaccgtgagtcaggacgccccgccaccggaaaggtcggggcaggagagccgtgtgccttattgcgtatctttgttgccttgggcgtccaggccactgaggtacgccgtgatcacttccatgccccgcatcaagtgattgcgcagtgtcaggatgctttcctgggttttcttcttggccaccaggttcagcagttcgcggtggtcttcctgggacgtctcgcccagccccatggcctcaaggttgtaacgcaggaaacgctcctcttcgttcaacccgtgctccaccaatttgagtagccgctggttcggggccctgccatataaggccatgtgaaacagtcgattgaggcggcccatttcggcgtagtctttttcctgctcaagagcacagatgattgcgtccgcctcggcaatatcggcctcggtgagtaaaggaatcgacaagcgcagcgcttcagactccagcagcattcgcagttcataggtttcggccgagttatcctcgatcaagggtgcaaccacggcgcctttgtgcgttaccacatgcagcagtgattgggcttccaactggcgcaaggcttcccgcaccggcatgcggctgactccgaacaggctggccagttcctgttggcgcatagcggtaccgcagggcaatcgaccatccaggatggcgttgcgcaaggtttcttcaatcacggaacgagcaagatgcgcgggaataggaccgcttatcttgatgctgttcaaaggggtcggcttgtgcgtcacggttacgctatcctcctttttctaattgggtggctaattggatccaatgcacactagagactgcccataagcttgtcaaacgagcacggtttcggcttgtaagcggctcaacatcatgctcccagcgcccacagccggtatttatggcgtcttacgcaaccaggttcattgagcctgcttcagcagttaccaatggcaacagcagcagctatggactcaacactttaccgttgcagtttattccccaagtgccaggaggtatgagttctcatggcactttcccgtatatagatattcattatcagtatttaaactgaggttcttatatctataaagtcgctctcctgactgaccgggagtgacctcatgtccgccacctctactgttccaacagcgaccgccaccgcccaaaccttcgagattctgcctttttccggcagcgtcggtgcccagatcattggcctggacttgtcgcgcccggtcagcgagcaggattttgcgcgcattcaccgtgcgcacctggaccatcacgttgtggtgttccgtgaccagcggatcacccccgaacagcagatcgccttcagtcgccgttttggtgtgctgcagatccacgtgctcaaacagttcctgctggccaaccacccggaaatcctgatcgtctccaacatcattgaaaacggccaatccatcggcctgggagacgcaggcaaattctggcattcggatctgtcttacaaagagctgcccagcctgggctcaatgttgcacgcccaagaactgccgtctgaaggcggcgataccctgttcgccgacatgcacaaagcctgggaccagttgcccgagcacctgcgtaaagctgtcgagggccgcagtgccgcacattcctacaccgcgcgttacagcgaaaccaaattcgaaggcaactggcgccccacgctgacccctgagcagcttgcccaagtcgcggaagtcgtgcaccccatcgtgcgcacccacccggaaaacggccgcaaggcactcttcgtcagtgaagggttcaccacccgcatcgtcggcctgccggaagacgagagccgcgacctgctggcccagctctacgcctacagcgtgttgccacacaacatctaccgtcaccaatggcagccccacgacctggtgttctgggacaaccgatcgctgatccacctggctgccggctgcccgagccacctgcgccgtaagctgtttcgcaccaccatccagggcgatgcgcctttctgatccccatttgcgccaagtgagatgaaatgaacatgcccctgcaaggccacgcggccagcactctgaacacggcgcagccgctgctggcggtggataacgtcagcctggaataccgcacgcccgagcgggtggtgcgggccacccaccaagtgagtttcgagatcgacccggctgaccgctacgtgctgctcggcccttcgggctgtggcaaatccaccttgctcaagtccatcgccgggtttatcaaaccctgcgaaggcgagatccgcctgttggggcaaaaggtcgagcaacccggcccggatcgcatcgtggtgttccaggaattcgaccagttgccgccgtggaaaaccgtcaagcagaacgtgatgttcccgctgctggcctcgaaaaccttgaagcgcggcgaagccgaagaacgcgcgctgcactacctcgacaaagtcggcctcagcgcctttgccgatgcctatccacacaccctttccggcggcatgaaagcccgcgtcgccatcgcccgtgccctggccatgcagccgaaaatcctgttgatggacgagcccttcgccgccctcgacgccctgactcgacgcaagatgcaggaagagttgctgctgctctgggaagaggtgcgcttcaccctgttgttcgtcacgcactccattgaagaagcgctggtagtgggcaatcgcatcctgttgctgtcgcctcatcccgggcgtgtacgtgcggaggtccacagccatcaatacgacctgcacagcctcggggacgtggcgttccaggcatcggcgcggcgcattcatcgcttgctgttcgatgaagcgcccgaggttgaacgtgagttgggtttcgccgatatccgcatcgcttactgaagggtcaacccaatgcgccaggaatttgaaatctccctagaaccgctgctcagtgtccccgtggaacgcgagttgcccttgcgtcaacgcctctggcaacaaggctggctgcgcaaaggcctgatcctgattgtgctcgcggtcctctgggaagccgttgcgcgctaccaggacaacgacctgctgttgccgagtttcttgcagacctttcacgcgctgtacgacggcctgctcagtggtgaattgctcagcaaagtcagcatctcgctggccgtgctgatcaaaggctacttgatcggtatcgtgctggcgttcgccctgaccaccctggcggtgtcgacccaactgggccgcgatttgctcagtacgctgacttcaatgttcaacccgctgcctgccatcgcgttgttaccgctggcgctactgtggtttggcctggggcagaacagcctgatcttcgtgctggtgcattcggtgctgtgggcgctggcgctcaatacctattcggggttcctcggcgtgtccgaaaccctgcgcatggccggtcgcaactatggcctcaagggtatgcgttttgtgctgttcatcctgatcccggcggcgctgccgtcgatcctcgcgggcctcaagatcggctgggcgttcgcctggcgcaccttgatcgccgccgagttggtatttggtgccaccagcggcaagggcggcttgggttggtacatcttccagaaccgcaacgagctgtacaccgacaaggtattcgccgggctggcggtggtgatcctgatcgggctgctggttgaaaacctggtgtttgatacgttcgagcgtctgacggtcaagcgctggggtatgcagcgttgatcccacgaggccataagaatcgtcgcttttaaataggaatggttgctctttgccctgtctggcttcgataatcccgtccgaattcggcgccgcgatggcgtcgaaccgttctggtaaagggatttacgacgatgcgttttcttgtcttggcagcggctgtgttgttatcgacctcggtgttggcggagttcgtacccgaagcagtgtccatgcccaagccgcaatacccggcgttcctgacgtcccttccgggacatgcgcgcatcagcttgaacatccacagtgatggttcggtcagcgatgtaaaagcgctcagcgccaccaagcctgagttcggcgcagccgccgtggcggcggcccaacaatggcgtttcaaaccctgggcggtgaatgcagaccagccagcggtgatcgacgcgcagaacgaaatgatcttcacgcctgaagaggtcagggcaacgagtactcagctgtcctttatggaaacgacctatcagtcctgcagcgcgttgaacgaagaagtcagtcagttccgccgtaatcatccttcccgtccgctcatccagatgaagagttttgccatcacccgtgtcgctgtgatgttcccggcattgagtggtaaaagcggctacgacgaaggcctgacccgggccgacgaactggaaagcgcgctgccggacatcgtgcgcaagtgccaggcgcaccctaaatccaccttcgcaaaatacctgcccgtcaaactgaggcgctatctgtaaagcctgctacgattgcgctcacttcacgccccgctgttcacgagttcctggcatgcaactaccggacatgaacctgctggtcgctctcgacgccctgctcgatgagggcagcgtagtgggcgccgcgcgccgcatgaacctcagccccgcggccatgagccgcacgctcacgcgtatccgcgaagcggtgggcgacccgatcctggtgcgcgccggtcgcggcctggtgcccacgcccaaggccctggagttgcaaggccaggtgcgcaacgtggtagagcaggcggcgctgctgttccgctcggcggaccaggtggacctgagcaccctgcgtcgccgtttcagcgtgcgcgccaatgactttttcattggggtgtatggcgggcgcctgttcgacaccatggagcgcatggcccccctgtgtgagctgtgcttcgtgcccgaaggtaataccgacgacgaggccctgcgcgaagggcgcctggacctgcgggtgagcaacaccatgcccgccagccccgaagtgaaagtgcagaacctgttctccactaccttcgtcggcctggcgcgggaagaccatccgttattcgatgaggaaatcaccgctgcacgtttcgccagctattcccatatcagcatctcgcgacgcggcattgcgcgggggccgatcgacaccgcgctgaatgcccagggcctggaacgccgtgtggcgatgatcgcaccgggctttcacggtgcaatgttcatgctgcccgattccgacctgctgctgccggtgcccaaggaagcgctgctgagcgcgacgcgcctgaaactgccactgcgcgccttcgccttgccgatctcgttgccgacgctggtattggcccagtcctggcacccgcgcttcgacaaggaccctgcccacaaatggctgcgcgaaaccatgcgcgaaagttgtcacgccacgtggctcgaagcgcagcccgtctgatagttgcgtttggcgcacttatacccttccaacaagtaactttttgtcatgtgtgtgcctgattaaactgctcgggtattgatcattccgagttgcctgtccatgacgtccctcgctgcccccacccttgcggccgcagccaaacccactgccatgaccccgcccgtattcggcccgcgcatcatcattggcctggtcggcgtgttgctggcggtgctggtctccggtctcaacgagatggtcaccaaagtggccctcgcggatatccgtggcgcgctgtacatcgggtttgacgaaggcacctggctggtcgcggcctacaccgccacttccgtggcggccatggcctttgcgccctggtgttcggtaacgttttccctgcgtcgcttcaccttgtacgccatcgggttgttcacggtgctcggcatcctgtgcccgttcgcgccgaactacgaaagcctgctggtgctgcgcaccgtgcaaggcctggccggtggcgcgttgccgccgatgctgatgaccgtggccctgcgtttcctgccggccaacgtcaagctgtacggcctggccggctacgccctcaccgccaccttcggcccgagcctcggcacaccgctggcggcgctgtggaccgaatacgtcggttggcagtgggcgttctggcagatcgttgcgccgtgcctgctggccatggccgccgtggcctacggcctgccgcaagacccgttgcgcctggagcgcttcaaacagttcaactggcgcggcctgttgctgggcttcccggcgatctgcatgctggtgatcggcattctgcaaggcaaccgcctggactggttcgagtcgggcctgatcaccttcctgctgtgtggcggcggtgtgttgctggtgctgttcatgctcaacgaatggtcgcagcccatacccttcttcaagctgcagatgctcggcctgcgcaacctctcgttcgccctgattgtgctggcgggcgtgctgatggtgctgacctcggtgatcatcatcccgtcgagttttctcgcccaggtgcagggttaccgtccactgcaaaccgcgccggtgatgctgctgatggcgatcccgcagttgatcgcgctgccgttggtggcggcgctgtgcaacctgcgctgggtcgattgccgctgggtgctggggatcggcctgggcatgctggtgctgtgctgcgtgggcagtgcgcacctgacgtcggaatggattcgcgacgatttctacggcctgtacctgctgcaaattttcggacaaccgatggccgtgctgccgctgctgatgctctccaccggcagcatccagcccatggacgggccgtatgcttcgtcctggttcaacaccatcaagggcttggccgccgtgatcgccaccggcgtgctcgacaccttgaccacccagcgcctgcacttccactcgaccatgctggtcgaccgcctgggcaattcgcccctggccgacggcgacgcgccgggcctggcgcaccgcctgcacgagcaggccgtggtgctgacctcttcggatctctattacgtcatggccgcagtcgcggtggcgttgatcctgctgattttctggatgcccacgcggatctttccgccgcgcgcaccgacttgattgaaaggactgttcatgaaacgcaaagacaaaatcgccgtcaccgtcatcgctgtatttgccgttggcgtgctggtgtacctggtcgcgccgagcgtgctgggcagcaagcgccagaccaccaacgacgctttcgtcgccgctgacttcaccctggtagcaccacgtgtggccggcttcatcaaggaggtgctggtggaagacaaccagcgcgtcaaggccgggcaattgctggcgctgatcgacgaccgcgatttccgcgccgccgcccaggccgccgatgccgacgctttggtcgcccaggcccaactgaaaaacgccaccgcgaccctggagcgccaaagctcggtgatcgcccaggcccaggccaccgtcgcggcggaccgtgccgaaatggctttcgccgaacacgaactgaaccgctacaaccacctcgccggtgtgggcgccggcacggtgcagaacgcccagcaagccaagacccgcatcgaccaggccactgcgcgtctggccaacgccacggcggtgctggcggccgaacgcaagcaagtggaaattctcaccgcccagcgcgatgccgccgaaggcggactcaagcgtgcccaggccgcgttggaactggccagttatcagctgtcgtacacgcgcatcgtcgcgccggtggatggcatggtcggcgagcgtgcggtacgggtaggcgcctatgtgacaccgggcagcaagatccttgcggtcgtgccgctggaggaggcttatgtggtggccaacttccaggaaacccagctctcccatatgcacgccggccaagcggtgcaggtgcgcgtcgacagcctcgatggtgagttgctcaacggtcatcttgaaagcctcgcgcctgcgaccggggtgaccttcgcctcggtcaagcccgataacgccaccggcaacttcaccaaagtggtacagcgcatcccggtgaagatcgtcctcgaacccaatcaggcccacaccgaacgcctgcgggtcggtatgtcagtggaagccagcgtcgacacccgcccggtcgcgcagcagcgtgaggtcgcccagcaatgaagcgagttgcctggctcaccttgagcctcatcagcctgagtgcctgcacggtcggtccggatttccacaagccccagggcccgccagtgacgcaatggagcgagctccaggggcgccaggcggccagccgcgccgtcagtgatcccttgcaggaacgctggtgggatgtgttccacgacgagcagctttcggccctcacacgccgtgcgctcaccgataacctcgacctgaaactggccagcagtcgcctgcaacaaagccgcgctgtacgccaggtgacgaccgccgagcgttatcccgaggttgatgcgacgggggcttaccagcgcaaacgcaacagcggcaaaggcctgagcgacccgtccggcgagaacggccgtgcggcgttcaaccagtgggacgcgggtttttccgcctcctgggagctggacttctggggccgggtaaaacgcgaaaccgaagccgccgacgccaccctgcaagtcgccgaagacgaccgccgtgccgtgctgctatcggtacttgccgagaccgcccaggactacattcaactgcgcggcgtgcagaatacccgcgctgtcaccgagcagaaccttgatgtcgcgcgccacagcctcaagctgtcgcaattgcgcttggccgacggcgtggcgaccgacctggatgtcgccgaagccgccgcccaggtcgccgccatcgaggcgcgcttgccagacctgcaacagcgccaggaccagctgatcaacgccctcagcctgttgatgggcgcgccgccgcaagcgctgcacacgcaactgtccaaggacgctgccgtgccgcaaacccagcgccaggtcgcgatcggcctgccttcggaactggccgaacgccgcccggacatccgccaggccgaggcccgcctgcacgccgccaccgccagcatcggcgtggccaagggcgacttctacccgcgcattaccttgtccggcagcctcggctcccaggccatgcaactctcggacttcggttcctggagctcccgcgcctttgccttcggcccgcagttcagcctgccgctgttcaacggcgggcgcctgcaaggcatgttgaacctgcgcgaagcccagcaacaggaagcggcgcttgcctaccagcaaaccgtgctgcgcgcctggcatgagatcgacgaccagttgacccgctacaacgccagccaactgcgccgcgacagcctggccgaagccgtgcgccagaaccagattgccctgcgcaccgcgcaacagcagtacgtggaaggtgtagtggatttcgtcaacgtgctcaccgtgcaaagcgcgctgctggcgacgcaggagcagtgggtggaaagctcgaccggcgtgtccctggcgatggttggcttgtataaagcgttgggtggcggctgggaatcggtgtatccattgcgcacggtgggtgcgggtcaggttaccgattctgcaaaaacaccacgtacccccgaaaccactcgctcccctgcaaataccccggcgcttcccactctccaccctgaatcaagccgatcttgaacggcagccccatccgattcatgcgtggcaagtacgccgcgtaatccgggatgctatggcgcccctggtacgtctgcaccaccacctcatccaccacgcccttgagttgggcgatggcagccgggtcggcgttgctgctccagtccatcaggccggtgatgctcaggcgcaggtcggccggcaaacgccggcgcaggtcgcgcaagaacccggcgtattcgtgcaggtattgggtgcgcgcatcgaagtcgatctggataccgactaccgggttgcccgcgtcgcgccagcgttgcacctggccgagcagttggctgtagaccggctcgggccagcgcagggtgtgcgcgcggtagacgatccagatgtcgccctggatcaggcggggcacgctcataccctgggcgatcatccgcacgccacgctggggcgcgcggcgagtcgagttgatctggccctggaggatgtacagggtcttggcctgcttgagtaccggctgtggggtaacgccactccacagccagaaggcgtcatagtcgcgggcgtcgacggcgccgaaggccgggcttgccagtagcagcaagccgagccacaggtgtctcaccagtagtactgcagggacttgccccactgggtgtcggcgaagccggttttcaactgacggaaccacgccttgcgcacggccggctccacatcgacgccgccgcaactgttgtagcccgatggcccatagcagttgatcgcacggaacagcgcgtaggccttgtcgttcttcggcgccttggcgttgccgatcacctgtttgtagccgtccaggcgcgagaaggtttcacccttgaagtccgatgcggtgctgcccaggctgccggcggcgcgtgcctgttccagcggcatgccgtccaggccgttgcgcaggatgaattcgcccaggcagttgaggccctgtgggtttttggcatcggcctgcaaggttgcggcgatctgcgcgatgctcgggcaggcgtagccggactcggctttgtcgccattccactggaacagcttcaaggtctggctgacgctgtagacgtagcccaggctggtgcccagtttgtcttccggggcgctggccggcagttgcttgaggtcgtcggcgaaggtggcgaactggccgcgcagcaggtctttgtagagcagcacgaattgtgcggtctggcgttccagcgggtcgctggcctgggcgatctgctggcgcagcagctcagggccggcgacgttgcgcagcaggatataacgcacctgtttggcgctgatcggcgagtcggcggcgaacaccttggctaactggccgctgcgctcgtagttcatcgccagggccagctccagctggtcgcgttgcagtggcaatttcgccagcggcagcagttgcagccagagggcttcggcgcctttccagtcttttttctcttccagggcgagggcgcgcagggtctgttggctgaaggcgaaataagtcaggttcgacggtacgctttgcggcaacagcttcaaggcagcatctggctgatgctcgctgtacagcgcattgaccgccagcaggtagtcatatagctctggcgcattggcgaatgcggctttttgcttttccaggtcggcgcgggagagggcgggctggtcgccaccgcgcatcaccatcaagtcactgacaaactggatcatcggtgtactgacggtttcgctgttgaccatcagcagcttgaggtcggcttcctgcaccagctcatccaccgacacattgcgttgtgtgtcagtggcctgggtcatggcccaggcgtaggcttcggcgagtttgctgttgtcatcccccagccaataaacccgccgcagcaggccacgggcggaggccacgtattcgccctttggataagcctccaggtagccgagaaaaccttgctcggcatcgttcaaggccgacttatccacacgcgcgagttgcggcatgccgtattcgtcgaaggcttcagcctgggcctggttcaaggacgtgcgtgcggtcatgtacgacgcagcttccttcagccaaggcagattgctggcgccggcagcgataaaaccccgttcggcgtcgccgaagcggccgctgtagaaatcggcggcggcttgcaggtaggtacgcatcagttggccatcggcggactgaatctgctgcgcgtccaccacctggccttcccaggagcaggcggtcagcagctgcaaacgcgccttcaccagcaactcgcgctcggctgccggcatgtcggccttgatcacctggctgatgaacgctgtggcgctgtcatcgtcgttgctgcggcagcggctgccttcgccactcagaaacgcttcccccgcagttttgtagtcgtcgcgcttgatacccaggggctggagcagcgtgtccagttcggcagtgcgcgagtcgtcgggcttgttgtccggttcctcgttagtgctcggaatcggcgccaggcgatagaccgcaaagggcacaggaccaaaaccttgggacagatcgtcttcgctcaacgcgttgggtgccaggggcgcggcgtttttgtcagccagcaacaggcgcaggttgacgcgactgtcgttgccggggctgaggaagggcaggttgctgcacgaatcgaggctgtcacgcgaaacccgccagtcggggtagcacgagtcgtcggagctggcctgggcctgttgggaaataccggcgagcaatgccagtgccaggggtgacagaaaaccgatgcgcatgacgtgtccttgatcctgagtccttggaggggcgcaataatagcctgttcctacggttgcttcggagaagccctgcacaaattgctgatttgtccgattccagcggcggatcttgggcttttgtcctagagtggcggtgtttgcgcttgggcaatcaggggaattgaggtgcgtcggtctgtggtagagcaaaacgaaaaggtcgggacgttaccggcactcaatcgcctcacgtgggaaggcgccggctggatcagccgtctctggtgggtgccgatcctggcgctggccatggccctgcgcttttaccaactgacggcggcggcgatctggggcgacgaaggctcgagcctgctgctcagtgaatacgccgtgggcgacctgtggtttcacgcggcgcacgacgtgcacccaccgctgtattttttcctgctgcgcggctggatcgaactgttcggcgacagcatctggtcgattcgcggcatgagcgccattcctggtgtggtcgccgtgggcctgggcacctggctcacccggcaactctccacccggcgcgcggcggtgctggcggggattctgctggcgctgttgccgaccgcggtgcgttacagccaggaagtgcgcatgtattcgctgctcggcgtgtggctgctgggcgccacgctggcgctggtgtactgggtgcgccaacccgagcgcacgcgctatctggcggcgtatgtcgtgttgatgacggccggtttctacacccattacttcaccgcgctgtgcgtgctggtgcactgggcttacctgggtgtgttgtgtggtacggcgccgcaaggccagcgcctgatcacacgcccggcctggtgggtggccaacgctgcgattgtgctgctgtacttgccgtggctgccgaacctgctggacctggtacagcatgtcgaacagctcaaggtggggggcgacatcggttgggaagatcccgtcagcctgttctccctgccgtcgatgatctggcagttcgtgctgcaggatgaaggcgtcggcttctgggcgccgttgttctggctgttcccgctgctgctggtggcggttgtcgtcatcacggcctggcgtgatcgcgagcgccaccgaccggccagcctgatggtgctgttctttctgttgccgctgctgctggtctacggcgtgtcgtttgtttccccggtatttatcgagcgttacctgacggtatacgccctgggtttgccgattctgctggcgatggccatcgaccgtctgccgtcgcggtttgcactgctgggagcggcgttgttcgtgctgtttgtcggtgtagagctcgtggggttgaagaacaatttcaccgtggatgagcacgaccaattcaacgtgccggtggagttcgtcaaccgcaattaccaggaagacgaccgcatcgtcctcagcgacatgttgtggtacttgagctacgtgtattacgaccagaccgatgcccaattgcagctctacaccccacccaagccggatggcacctcaacccggccgaatgcctacggcttcggcaccctggtggaccaggacggcgggcgcatctacctcgaccgcctgtcggcactgcccgccgaaacccgccgcgtgtggctgatcagcagtaacgaagccccggacgatttcgccccgctgcccgaaggctggcgcgaactcagtcgccaggatggcggaggcgccagggcgcggttgttcgtgttgtgcaacgtcccgtcggcgcaacccgagggctgccgctagactgggtgaatgcttttctatcaggagcccgtcatgcaatcgcccgtacatagcttgccgtcactgttcaaacagctcgggttgccggatgacccggtgagtatcgagaaattcgtggcggtgcattcaccgctcaagccggatttgaacctggcggatgcgtttttctggacggacagccagaaggcgtttttgcgcgaggagattctggaggatgcggattgggctgaggtggtggatgagttgaatctgatgttgcggggtgggcgaggggtgcaaaaaacttagcagaaagggcaaaagttaaaaaaatctggtgaaggttaaaaaaatctgaggttttaccgcgttagtgaactttttctgacgcaagggcctgggtttgatggccggaattcagtactggcccccagacccgctttacttacccctaccacccaccacccatccgcaaaattgtttcaaaacttgacgcgataggatccatccaccatattgatagttagcaaactaactgtatgcgaactatccagtgcctcaatccctcgaacaactccagatgaacctcagcagcagcatggtggtgggcgcccgtaactggcgcaaaatctgccagaccacgctggtgagctatggcatctccgaagcctgcgccgtgccgttgttgatgatcggccgcctgggcgacggtgtgcatcaggtcaaagtggcccaggcctcggggatggaaagcccgtcgctggtgcgcctgctcgaccggctgtgcagcgacggctatgtgtgccgcaccgaagacgtacacgaccgtcgcgccaagtccctcagtcttaccgagcgtggccgcgagttggtgcaagcggtggaagagcaactggtgcgcctgcgcaaggacgtgctggcagacatcgcccacagcgatatggaagccgcgctgcgcgtgctgcgtgctttcgaggcggcgtcgctttgaacggattttttaccggcttcccacccgcccgcgattggttttacggggtgcgcaccttcgcggcttcgatgattgccttgtacatcgccatgctcatgcaaatgccgcgtccgtactgggcgatggcgacggtgtatatcgtttccagcccgtttgtcggcccgaccagttccaaggcgctgtaccgtgccatcggcaccttcatgggtgccgcggcggccgtgctgttcgtgccgatgttcgtgcagtcgccctacatgctggtggtggtgatcgccttgtggacgggcacgttgctgtttctgtcgatgcacttgcgcacggcgaacaactacgcgctgatgcttgccggctacaccttgccgctgatcgccctgccggtggtggataacccgctggcggtgtgggatgtggccgaagcgcgcaccgaagaaatcttcctcggtatcgtggtagcagcggtggtgggcgcaatgttctggccgcgccggctcatgccggtgttcgatggttcggtggccaagtggtttgccgatgcccaggtctacagccaacgctttatcacgcgaaatgtgcagcctgaagaaatcagcaccttgcgcggcggcatggtcgccaccttcaacaccctcgaattgatgatcggccagctgcctcacgaaggcgcacggccgcagacggtgcgcaataccaaggagctgcgcgggcgcatgatccacctgctgccggtggtggacgccctcgacgacgcgctctatgccatcgaacatcgcgcgccggagttcctcgataaaatcacgccgctgctggaagcgaccagccagtggctggaggacacccaagaagcggcgccgatggaacgctggcgcgtcctgcgtgaccaggtcgacgccctgcaaccgagcggcgaagcactcgatgatcgtcatacgctgctgttctccaatgcgctgtatcgtctggccgagtggatcgacctgtggcaagactgccgcagcctgcaagccgccatccagtgcgaaagccaggacacctggcgcgccgtgtaccgtcactggcgcctgggccggctcacgccgttcctcgaccgtgggctgatgctttactcggcgttttccaccgtcaccgcgatcattgtcgcgtcggtgttgtggattctgctcggctggaccgacggcggcagcgcggtgatcctggccgccgtcgcctgcagcttttttgcttcgatggatgacccggcgccgcagatctaccggttttttttctggaccgccatgtcggtgctgttcgccagcctctatctgttcctggtgctgcccaacctgcatgacttcccgatgctggtgctggcgttcgcggtgccgttcatctgcatcggcacgctcaccgtgcagccgcgtttctacctgggcatgttgctgacgctggtgaatacctcatcgttcatcagtatccagggcgcctatgacgcggacttcctcaacttcgccaacgtcaacctggccgggccggtgggcctgctgttcgcctttgtgtggacgctgatcgcgcggcctttcggcgctgagctggcggccaagcgcctgacccggttcagctggcgcgacatcgtcggcctcaccgaacctgcgaccctggccgaacaccggcacatggccgtgcagatgctcgaccgtctgatgcaacacctgccacgcctggcgctgatcaaccaggacaccggcaccgccctgcgcgatttgcgcgtggcgttgaacctgctcgacctgctggcctactcgccgcgcatcctcggcgtgccacgggtgttgctcaaccaagtcgtcgaaggcgttggcggttacttcaaggcgtgcctgaaggccggtgaacgcctgcccgcgcccagcggtctgctgatgaccctcgaccgcacgcgccgcgcgctcaacggccagggcctgcaagacgaagacgacacccggctgcacttgttgcacgcgttggccggtttgcgcctggcgttgctgccgggggtggagttcattggcggcactgagatggaagcgccgctgcctgatggagcgcctttatgatcggagatctggatatcagcggggtgttcctgcccacgctgctggtgctgatgggcattacgtatgtgttgttcctggtggtgcacgggttgttgacccgcctccacttctatcgcctggtctggcaccgggcattgttcaatgtggggctctacgcgctgttgctgggcgcggtggactcactcagtcgatacctgatgacatgaaaaaaccttttttgactatcggccgtgtagtcctcacgttgttgatcgtaacgtttgcggtcgtcgtggtgtggcgcatggtcatgtactacatgtttgccccctggacccgtgacggccacatccgtgccgacatcgtgcagatcgcgccggacgtgtccgggttgatccagcgcgtggacgtgcgcgacaaccagttggtgaccaagggccaggtgctgtttgccgtggaccaggaccgcttcaagctggcgctgcgccaagcccaggccgccgtggccgaccgccaggaaaccctggcccaggcccagcgcgagtacaagcgtaaccgtggcctgggcaacttggtgcccagcgagcaactggaagaaagccagtcccgcgtgacccgtgcccagtcggccctggccgaagcccaggtgacggtggattccgcgcaactgaacctcgaccgctcggtgatccgcagccctgtggatggctacgtcaacgaccgtgcgccgcgtacccaggagttcgtcaccgccgggcgcccggtgctgtcggtggtcgacagcaactcgttccacatcgacggctatttcgaagagaccaagctcgacggtatccacgtcggcatgggtgtggacatccgtgtgatcggcgacaacgcccgcctgcatggccatgtgcaaagcatcgtcgccggtatcgaagaccgcgaccgcagcagcggctccaacctgttgcccaacgtcaacccggcgttcagttgggtgcgcctggcccagcggattccggtgcgtatcgcgtttgacgatgtgccggcggacttccgcatgatcgccgggcgtaccgccaccgtctcgatcatcggcgacaaggtcaaagacggagacaagccatgaagcagctgttggccgccgccgcgctggggttgctgctgtcggcctgccaagcggtggggccggattacacgctgccggaaaagtccgccatcaaccggggcgatctgcaagggcagatcgccggcgagggtagcaatgtcgtctcggccccggtgccggccgactggtggaagctgtacaacgacccgcgcctggatgagctggtgcgccaggccatggcctccaacaccgacttgcgggtggccgccgccaacctgcaacgcgcgcgtttccagacccaggaagctgagtcggcgggcggctggagcgcgggcgccaaggccgaggcccagcgtctgcaggaatccggcgaggcgtttttgctgacggaaaaagtcccggtagccaacatcggcagcgtgggcatcaccacctcgtaccagttcgatttgttcggcgccttgcagcgcggtatcgaaagcgcccaggccaacgcggatgcggctcaggctgccgccgacatcgcccgcatcaccctggtggcggatgtggtgcgctcatacacccaggtgtgcgcggccaacgaagaactggccatcgccaacgagtccctcgacctgcaagcccagagtactcagctgacgcagcgcctgcgtgatgccggacgtggcgatgaaacccaggtcacccgctcgcagacccaatacaaatccctgcgcgccgacatgccgcgctacgaagcggcgcgccaggccggtttgttccgcctgtcgatgctgctggccaagccggtggaccaattgccggccggcaccggcacctgcgccgagctgccgcatatcgcgcaattgctgccggtgggcgatggcgcggcgctgctcaaacgccgtcccgatgtgcgccaggccgagcgccaactggccgccgccaccgcgcgtatcggtgtggccaccgctgcgctgtacccggacatcagcatcggcgccaccgttggcaccgtcggcatactggatgacttgggcacggcgcccaccaaccgctggggctttggcccgatgatcagctggacggtgccgaccaacggcgcccgtgcgcgtatccacgaagccgaagccgcgacccagggcgccctggcgcacttcgacggcgtggtgctcaatgccatccgcgaaacccagaccggccttgcgcaatacaccgcgcaactgcaacgccgtgatgccctgaatgaggccggcgagtcggcgaaggaagcggcggggcagacccatcgcttcttccaggccggtcgcgcatcgttcctggccgacctgcaagccacccgcacctataccgatgtgcgcgcacagctggcagcggccaacacccaggttgccatgagccagatcgatctgttcctggccttgggcggcggttgggaaagcggacgaacgcaagcgtcacagcccggcaaaccctgagctaaaagctatgcttggtcaggtggggcgccgtgacgctccacctgacactgctcgcgtttgctcatggggattccaataatgaaaaacccttatgctcccgctttctggtgcgtgctcttcgcactggtgctgttatcggctgcttatttctacggcgtcatgctggctcaccaactcgacaaggccatggtgtttctcgacagcgcctgcctggtgatcggcaccctgtccatcggtgtggtggcctgggcctcttaccaaaatcaacgggtgaagcgaaagctcctcgaacagggcaagacccgtgtggcgatctgggacaccaaggtcgcgctgcgccgggtcgagaccgtgttcgaccgctatttctggggcagctattggcagccggggcgtaccttccaggaagtcatgggcgacctcaccggcactcccctggaaaagagcctcgaagtcctgaaaaaacagtgcgtggcgctcgaccagcaagtggccgacggtcggcattggctgaataacgcgcgggagctgtccgacgtggccacgcaaatggcccgcgagcgctaccagctggacttctgcgaccccaaggccgatacccccggcaacgccgtgatacaccgcgagtttgaggtactggtgtacacctggacggcgcggttgaagagtttcgaccaccagttggatgaaattgagttggagtactcctgaactactgctgaactgatccctctgaaaagctgggccgttcgcggcccccagtgctaatcttcccccgttttcggcgggcttgagccaaccccctcggggttcaaggaagacagcccacttctcacaggatttgatcaggtcacttcatgaataagccagcagtcgttcttttgggttttgttgtcgccgtgggcgtcgtcagcgcaggcggtgcctggtacaccggcaagcagttggagccggtgctgcaaacggccgtgcaggacgccaacaaggaactgcaacgctccatggcgggcgtcgacggcagcgccacccttgagctggtgtccctggaccgtggcctgttcagcagcaccgcacactatcgcctcaagggccagggctcggtcttcggcgaacagaacccgaaccctgagctgctgattgtcgaccatatcgaacacggcccgcttccattctcgcgcctggtgtcgctgaaatggctgccggtcatggccaccagtcactatgcactggaaaagaacgccaccaccgagaagtggttcgccgccgccaaagatgtgtcgccgctcaaaggcgtggccaatatcggctacagccgttcggtgaacggtaatctcgaactgctgcccctggagttcaaggatccgaccggctcgttgaacttctctggcctcaatctggatttcgacagcactgccgaaggcaagaaggtcaaggttgatggctacatgaacagcctcaagctggccgttgtcgacgccaacggcgcgccattcgacgctgaaatcgccggcctgaccgtagccagcaacctggagaaatccaccttcggcttctacaccgggcagaacaccatcgagctgagtgacaccaaagtcacgttcggcccgcagaaagccgtgctgaccctcaagggcttcgagcagaaagactccagcgaagtcaaagacaacaacatggccggccgcgtcgattacaagatcgacgagatcggctatcagggcaaaccggtcggctctgccgccatggccctgagcctgaagaacatcgatgtgccatcgggcctggtgttgaccaagttgtaccaggacaagatgcagccggtgcaagccgccgccgctgccggtcaaccagtgccggagctgcaattgaccgaagccgagcaggccctggccgaagccaacgtcaaccagttgctggctgccaagccccacctggcgctggaaaacctgtcgctgaaaaccacccacggtgagagcaaattcaacctggtgctggacctggccaagccgacttccatggagctgccgccggttgagctgggcaagcaaatggtttcgctgctggatgccaacctgaccttgtccaagccgatgatcgccgacgttgccgccctgcaagcgcaggttggcggtgtgaccgaccctaaagccatcgagcagcaatcccagatggccagcgagatggtcagcggcatggccgtgggtacacagttggcaaccctggtgggcagcgacgtagtgtccaagctgcactacgccaacaatgaagtgaccttcaacggccagaagatgaccgtcgagcagttcatcagcttcgtcatgtccaaagtcggtgcggttggcggcgcgcagtaaaaatttcgccatcgccctgaaataaaaatgggggagcggggatgcccgcgataaaggtcaaaccgtcgacactcatgtcgactggcaaccctctatcgcagctaaccctgctcccccattcgtatttcagatttgcagtgcaattctgaacaattgttatgacttgtccttttccatccgcgcgtcggggatagttcctacaggaaagctaggtcgggtcacgagacgccgacaccctgatgcaaattgctcaggaccacctatcgttacagctttccgtgtgtaaggaagctcacgatatgctgcgaacactcccactcagtgcctcaggccgtttgcggctgctcatcggggtaaccttgtgcagccagttgctgatgcccactttcgccttggccgacccggcctacgacgccctgatcatccaggcgcgcaacggtaacttcacccccgccctgacccaattgcgccaattgccagccgagcgccagacgccaggccagatcagcgaccacctggtgatcgctggttgggccggccaggatgccgaagtgctgaaggtgtacgaggcgcagggccagaatcgcaacctgaccgcccaggcgctggccacggttgcgcgcacgtatcgcaatcagaagcagtgggcgcaggccgaagcggtctatcgcaaggcgctgttgcgtgagccgaataatatcgatctgcaactgggcctggccctcaccgaggctgacggtggcaaggccagcgaagcggtgcagcgcacccgcgcactggtggccgccaagcccgacgatcccaaccgccgcatggcgctgggctacgccctgacccgtgcaggcttgcagtacgacgccttgtttgaattcgaccaggcctttatccgtgctggcgacaaaccggaggtcgcccgcgaatacgtggtcgccctgcaaaaggcccgcctgccgcagccggcgttgcgcctgtcggcccagcgtccggggctggtcgatccggtgacccagcgtcgcctcgaaggtgacctggccgcagagcgcgtgcgcatcgccgagttcgccacccgtaccgaaaaagaacgctatgtcatcgccgaccgtgcgctccaggactacgacaagctcctcgcccgctggaccccggacgccaccgcccatgacgacgtggtgatctggcgcatcgaccgcctgggcgcgctcaaggcacgggcgcgtaccgctgaggtgatccgcgagtacgagaccctccaggctgaaggtgtgcggttgcccacctacgccaagcgttgggtggccgcgtcctacctcgaccagcgtctgccggaaaaggctgcaccgttgtaccgcgaggcgctggacgcacccgatgcggacgtgggcgaccgtgttgaagacaccaccgcgctgttctacgccttgctcgaaaacgaccaggtggacgaggcgcgggcggtcgccaagcatttggccgacacccagaaaccccgggttgaactcaaggggctgccgattggcaacccgaacgatgagtggatggacgcccaacaattgtccgcgcaggccggcacctacggcgccgacctgccctccagcgaaaaagccttggacgacctggtgagcaaggccccaggcagcataggcctgcgcctggcgcaagcggaaatgtaccgcgcccgtgactggcctcgacgcgccgaacgctcgctcaaggaaacagaggcccaggccccacgcgacattggcctggaagtgagtcaggcctacaccgccctggacctgcaggaatggcgtcaactcgacatcctcaccgacgacgtagtcggccgtaaccccgacaaccgccaggtgcagcgcctgcaacgcctgcgcgaggtgcatgacatggccgagctgcgggtcgaggcctacaccggtaaaagcttcggtggtggcagcaacggcgatgccggtgctgtctcgggtagccgtgactggggcattgaaagccggctctacacgccgcccatcgatgaagactggcgcctgttcgccggcgccggctatgcccgcgccacgttcgaagagggcaccgggcagcatcgttggcaggtggtcggtgtcgagcggcggacccgcgacatgaccattgaagccgaggtctccaaccattcctacggcgatggctcaaaacaaggcgccgccgtttcgattgcccgcgacatcaatgacaactggcaatacggcggcagcctgggctacctgctgtccaccaccccattgcgggcgctgaatgacggaattacggccaacggcggcagcggtttcatccgctggcgcgccaacgaaagtcgcgagtggaaactgaccctcagcccgtcccatttcagcgacggcaacgaccgcttcgaagccttgctcagtggccgcgaaggcctctacagctcgccgaaagtgcaagtggacctgggcctggaagtcggcgccagccgcaacagcaaggaagacacgatctacttcaacccgaagtcggacttcaccgtgttgccggtcctcaacatcaaccatgtgctctatcaccgctacgagacccagtggagtcagcagttccaggtcggtgcgggtacctacagccagcgggactattccaccggtggcatcggtctggtgggctacggccaacgctttcgctggaacgatgtcctggaagccggcgccaatctgagcctggtcagccgaccatacgacggtgatcgcgaacgcgatctgcgtctgctcgtcgacctcacttatcgtttctagaagagcctgaccatgaccgtcttcagccgttgcctgttgatcctgggtgtaatgctggccagtgcctgcgcccagcaacccgcgcctttcactccacccgccgagcggccgaccccggccaacgaagcgccgtggccgaaaaaccatttcctgggcatcgcctaccacgacatcgaggaccgcgaccccgatcaggcggtggtggcggtgcgtaccgagcgtttgatcgagcaactggcgtggctgcgcgagaacggctaccaggcggtcagcgtcgaccagatcctggcggcgcgcaacggtgggccggcgttgccgcccaaagccatcatgctcagcttcgatgacggctactccagtttctacacccgtgtgatgccggtgctgcgcgcctatcgctggcctgcgctgctggcgccggtgggctactggattgacacgccgatgaaccagccggtggacttcgccggccaaccacggccacgtggcgagttcctcacctggcagcagatccgcgaagtgtcgcagtcgggcctggtggaaatcgccgcgcacaccgacaacaaccacaaaggcatcctggccaacccccagggcaatctggaaccggcggcgacttcgctgcgctttgacccggcgacgggccgctatgaaagccaggcgcagttcgatgcgcgcatgcgtgccgacgtcgtagcgatctcgaacaagatccagaacgtcaccggcaaaaaaccgcgcgtgtgggtatggccgtacggtgctgccaagggcacctcgctggcgatcattggcgagcagggctaccagatggccctgaccctggaagatggtctcgacagctctgccgacttgatgaacagcccgcgcttcctggtggcttccgacccggatggcgaacacttcgccaacagcatcgtcgcggcgcaaaccaaggcaccgatgcgcgtgttgcatgtggacctggataacgtctacgacccggacccggcccagcaagcgcgcaacctcgaccagttggtgcagcgcgtggtggacatgggcgcaggcactgtgttcctgcaagccttcgccgaccccaagggtgacggcctggtgcatgagctgtacttccccaaccgccacctgccggtgcgtgccgacctgttcaaccgcgtctcctggcaactgcacacccgggcgcatgctgcggtgtacgcgtggatgccggtgctcagctttgccctcgaccccaagctgccacgcgtgacgcgttgggacccgcaaaccggccaggtcggcctcgatccggaccaatacaaacgcctgtcgccgtttgatccgcaggtgcgcaagatcatcggtgagatctacgaagacctggcgcgcaacaacgccatcgacggcgtgctgtaccacgacgatgcggtgctcaatgatttcgaagacgccagccctgccgcgctcaaggcctacgttgccgccggcctgccgggcacgatccaggccttgcgtgccgaccctgcggtgatgcaacgctggacgcgcttcaagagccgctacctgatcgacttcaccaaggagctgaccgccaaggtccgcgccattggtgggccgcagttgctgacggcgcgcaatatcttcgccgagccgatgctcaacccaggcagcgaaacctggttcgcgcagaacctcgatgacttcctccagacctacgactggaccgcgcccatggccatgccgctgatggaaggccaggaatacaagacctccaacgcctggctggagaagctggtggcgacggtcaaggcacgccctggcgcgctggagcgcaccgtattcgaactgcaagccaaagactggcgcaccaaggccgcaccggacatcgacagccaacagatggctgaatggatgggtgtgctcaagcgccagggtgtcaccagttttggctactacccggacaacttcctggaaaactccccggacctgaagactgtgcgtccggccctttccaaccaatggaacccttgaccatgttcgatagaatcctggctttattcgtgctggcattggtattgggtgtgcccctgggcctgatcttcctggtcaccgggcagttcctgatggactttgtgtttttctacccgctgttcatgtcggcgttgtggattgccggcggcctgtacttctggctgcactgggagcgccactggccctgggaagaggacaccccggcgccaaccctggccggcaacccgctgatctcgatcatcatcccttgctacaacgaaggcgataacgccgccgataccattcatgcggcgctgggtcagctgtacccgaacatcgaagtgatcgcggtgaatgacggctccaaggacaacaccgccgccgtacttgatgccctggcattggagaacccgcgcctgcgcgtgctgcatctggcgcagaaccagggcaaggccgtggccctgcgcatgggcgccgtggcggcgcgcagcgaatacctggtgtgcatcgatggcgacgcgttgctcgacaaaaacgccgcggcctatatggtcgcgccgatgctcgacaacccgcgtctgggcgccgtcaccggcaacccacgcatccgcacgcgctcgacgctgatcggtcgagtgcaagtcggcgagttctcctcgatcatcggcttgatcaagcgtacgcagcgggtgttcggccggatcttcacggtgtcgggtgtggtggtagcgttccgtaaaaaggcgctggaccgcatcgactactggagcaccgacatgatcaccgaggacatcgatgtcagttggaagctgcagctcgatcactggagcatcttctacgagcctcgcgcgctgtgctggatcctgatgcccgaaaccgtcggcggcctgtggaagcagcgcctgcgttgggcccagggcggtgccgaagtgctgttcaagaacatccgtggcatctggcaatggcgccatcgctacctgtggccgctgttgttcgagtactgcctctccactggttgggcgtttaccttcctgttgtcggtgatcttctacgtgctcggcaaattcatggtgctgccaccggccattaccgtggactcgctggtcccgccggcgtttaccgggctggtgctggcgatggtgtgcctggtgcagttcgcggtgagcatcatgatcgaccgccgctacgagaaagacctgtggaaaaccctgttctggaccgtgtggtacccgatggtgttctggctggtgagcctgttcaccaccctggtcagtttccccaaggtgctgttcaaccaacatcagaagcgtgcgcgctgggtcagccctgatcgcggcatcaaacctaccgaagaggaggcgtgatcatgaaactggtcagaacccgccagcgtttggtgatgtggattattgatgtggtgttgaccctgatggcctgggccgggttgatctggctgctggcgcgcgggatcacctcgatgctggagactcacggcgggccgcgcattgaggcgccgatctttgccgcgctcaacaccttgcaggtgtacctgtggattgcattgttcaacgccgtgatcctggtcacttgggcgcgctaccagcaacgcaaggggcgcaagtttgcccagcgccgtgccgagggcaacgccctcagtgacaagcgcctgagcgagagcttcagcctcggtgaaggggacctggagcagttgcgccgacctggggtgttggtgatccagaatgacgacgagggcggtgtggcgggtgtgaagtcccatgtctcccgcgatgtggaaaaaccggggctgaccctggtgcccggcaaggaccagaacaaagacgccagctgagccagtgcgctgtaaggtcgttcccatgcaacgtgggaacgacctcggttaatcccgacaagtgggatccaattcacaaaacgcccgcgaacttttctgctttttccggtactaacttatctcggcaagaacttgatggccaattaatggcaatttataagttctccgatgaatcgcgatcaatagtgctgccgctggtcgaaataatacttccgatgacaagccgcttatctatctgattaaatttagttgttattaatcaacagcttgcgtgaataactagtacgaatgtgcaactagctcgttgttttgagtgggtgcaagttcgatgttagtttgccggcccttgattttcgacggatcgaacatgtctttgttattgccacggactcggtactttctgtgcactttcctgcttgcttatttgagcctgaacagcgcctcggccgcccctacgccaggggatcaggacctgatccgcgaccgccagaaccgtcttctggaagagcagcgtcggcgcctggaagaactccaggacctgcctggcaaagaagccaagccccaggctccggccacgccggtcgacacccgctgcttcccgatcaaagacatcgaactcaagggcgccgacagcctgtccggcgcggaccgcacgcgtctgctcaagccctatatcggccaatgcctgggcgtggcgcagctcaatgagctgctcaaggtgatcaccgactactacatcgccaaaggccgcgtcaccagccgtgcctacctgccgcaacaggacctttccagcggccatctgcaagtgctggtggtcgaaggcaagctcgaaggcttgaaaggcgcccaaggcagtaccgtcaccgaccgcgagttggccatggcctttcctggcaaggtcggcgaggcgctgaacctgcgggaggtcgagcaactggtcgaccagctcagccgcttgccgtctaggcaggcgcagatggaactgacccccggcagccagatcggcggcagcgaagtgctggtcaagaacaccccgcaaaagccctggcgcgccagcctgtcgcgcaacaacgacgggcagaaaagtaccggcgaacagcaatggggcgcaggcctggaatgggacagtcccctgggcctggccgatcaactgatactgcgcggtggccacgacgccatcagcgaccaccagaaaacctcgaaaaacagcatgctgtattacaacgtgccgtggggctggtggaacttcagttacacctacagcgagagcgactaccgcacgccgggcgaccttgacggctacaagtacaagcagacaggcgacagccagaaccaccagctgcgtgccgagcgcgtggtgcatcgcgatgacgtgagcaagacctcggtcaatgtcggcctgacccatctgcgcaccaacaactacttcaacgacgagcgcctggacgtcagcagcaaccgcctcagcgagttccaggtgggcatcaaccatggacgccgcatcggcagcgccttcgtcaacctggatgtcggcatgcaaaacggtaccggcgcctttgacgcccagaaggatgaccaggaacgtatccgcggcaacctcaccccaaccccgcgctaccgcaaatacaccgccacagtgagctacctgcaacctttcacgctgtggggcgaatcgttgagtttttccagcctggccaccgggcagcgcagtgaagacgtgttgtacccggcgcaacgcatgagcctcggcggctcgtattcggtgcgcgggttcaaggaccagcaactgaccggcgacagcggcggctactggcgcaacgaagtgcgctgggcccgcccggtgaccctcgactggatgcgcccggcctttgtcgaatacggcgccagcgtcggttacgaccaaggcgtgattcgccacgatcgctacaacgatgaccagcacggccgggtgtcgagtaactccctcgagctgttcgctcgcggcaaaaacgtcagcaccagcgtgacctttgcccactccctggagcgacctggcgtgatgaccgagcgcgaagcgccgatctatttccgcctggatttctacctgtaattcaacgcccgctgccttgagattttgaatatggacgttcgccctgttactgcccttaaaaccctgagccaacgcggcctggccttgatcctggccaacgcgctgttctggcagccattgctggcgagcgccgaaggcatcgtggtcagtggccccggtaccacggtcggccaggcgggcaacggcgtgccggtggtgaacatcgccacccctaatggcagcggcctgtcccacaaccagttcaaggactacaacgtcggccccaacggcgtgatcctcaacaacgccaacagcattgtgcaaagcacgcaactgggcgggatcattgtcggcaacccgaacctcaagggcggtgcggcgaatgtcatcctcaacgaagtcaaaggcggcagccccagccaattgcgcggctacaccgaagtggcgggccagtcggccaaggtgatcgtcgccaacccttacggcatcagctgcaacggttgcggcttcatcaacacccccaacgtcaccctgaccaccggtaaaccggtgatcgatcaggccgggcaactgaaaagctaccaggtcgacggcggcgccgtgaccatcgacggcaaaggcctgaacgcgagcaatgtcgaccgtttcgagatcatcacccgttcggccaagatcaatgcgcagatcaacgcgaaacaactcacggtgatcgccgggcgcaatgacgtcgatgcccaaagcctggcaaccaccgcccgtgccgatgacggcagtgccaagccggagctggcgattgactcgtcggcgctcggtggtatgtacgccggcgcgatcaaactggtgggcaccgaagccggtgtgggcgtgaagctcgacggtacgctggccgccagtggcggtgacattcaactcgatgccaacggccacctgagcatggcccaggctgccgccagcggcgcagtggacatcaaggctgccagcctggagaccaagggtgcggtctacgccggcaccaccctcaaggcacagaccaagggcaccctgaaaaacagcaagaccctcgccgcccgcgacagcatcaccctggccagcaacggccagttgaccaacagcggcatcatcgaagccggggtcaaccccgacaacacgcgcaatgccggtggcgatgtcagcctcgacagccagcgcatcaccaacaccggcaccgtgatcgccaatcgcagcctcaccgccacggcgcaaagcctggataaccagggtgcgaccttgagcgccaagcaggcgctgaacatcaccgccgccagtgtcgacaaccgcaacaaagggcgcctgctcagcgacggcacgcagacgctcaacgtcagcggcctgctggacaacagccagggcggcatcatcgacagcagcggtgcgttcaccctcaacggcaatagcctggataacagcgccggtagcctgaccggcggtggggtgatcaccctggatctgatcggcgacctgatcaaccgtaacggcaagctggccagcgccgggccgttgctgatccagcgcgccgcgcacatcgataaccagggtggcaagctcgccagccagggcttgctgaccgtgttcgccaacagtgtcgacaaccagaacaacggcaccctggccgccaacgatggcctggtcctgaccaccagcggcctgttgcaaaacagcggcaacggcctgatccacagtgaaaacgctggcgtgaccatcactgccggcaccctcgacaacaacggtggccgcatcgccgccaaagccggtgatgcgcagatcgacgccacggatttcaacaacggcagcggcgcactgttcgcccgggatcgcgtgcacctgaccggtatgaatgtggataacggcggcgagatcgccggtaaccgcatcgacgtcagcctcaatggcgcactgaccaaccgtggcctgatcgaaagcgccacggccctcgatgtcgagaccgccagcctgaacaacagcgggcaaatgcgcgccttgggcaccagcggcaaaacccgctacgccatcggcggcctgctcaacaacagcggtagcctggagaccgccaacgaccaattgagcctcgccgccacccgcttccagaacaccggcggcaaggtgttgcacgtgggcaccggcgtgctcgacctcagtggcatcagcctcgatgacgtgggtggcagcctggtcaccaacggtgacctgaccttcgataaagcaagctggaccaacagcaccgcgatccaggccgggcgcctgaccgtcaacgtggataacctgcaacagaccgccaccggcaagctgctcggcacccgtgccctggtcggcagcggccaggactggaccgtgggcggcagcgtcgccagccagggcagcctggatctttcggtgggcaacctgctcaacgaccacggtttgatcttcagcggcggcgacctgaacctcaaggtcgaccgcctgaaaaacctcggcgccacgatctacgccatgggcaacctgcgcgttgatcgcgacggccagggcggcttggccaccagcatcatcaacagctcgggcaccctcgaaagcgagcgtaacctggtcctggctgccagcacgatccagaacatccggactgtgctcaacaccgagtccggcatctacagcgcctccatcacgcccaccgcctgcatctttcgcgtgaccggtggcgactgcgacggccccaagcagaaccgcccgttcctgattacccagcgtgatcacttcatcgtcagccaggccactgcagcgtccagcatcacctcgggcggcaacatgctgctcaccggcggcgagctgctcaacagcagcagtagcattgccgccggtggcaatctcacggccatcgtcaaccagctcaccaacgtcggtgtcgtgacccacgacacccagtacgatcgcatcttcacttccgagcgcgagcgtaagccggggggctggtaccgcgaggcagcggccttcacccagcgttattcggcaggccaggacatgggcggcgtcgaagcgggcctggcctcgttcatcggtaagatggagagcgagcagatcgccctgcgcaagaccacccagttaagcgcgccagaccaaagttacgccgctgtgatccaagccggcggcagcgtggatgtgaaggcccaggccggcatcgacaacagcgtcgtgcgtggtggctacacctacgtcggcagcggtgccaacacccatgcgccgggctactcgaccctagtcagcctcaacccgcaactgccgccggacgtggcccagcaacaggtcaacccactgggcctgcccggcttcgacctgcccactggcgagaacggcctgttccacctcagcgacagcgatggcgccaaaggcctgcccaccagccagttcgcggccaacccgcataagtacctgatcgaaaccaacccgctgctcaccgacatgcgccagttcatgagctcggactacatgctgagcaagctcggctatgaccccgacaccgcgcaaaaacgcctcggcgatggcttctacgaacagcgcctgatccagcaagccgtgctcgctcgcaccggccagcgtttcatcgatggccagaccagcgacgccgacctgttcaagcacctgatggacaacgccatcagcagcaaaagcgcgctgaatttgtccgtaggcgtgagcctcaccgccgaacaagtcgccgccctgacccacgatatcgtgtggctggaaaacgccaccgtcgccggccaacaagtgctggtgccggtgctgtacctcgcccaggcaagcaaccgcctggcgcctaacggcgcattgatttccggcactgacgtcaacctgatcaccggccgtaacctcaacaacgccggcaccttgcgtgccaccggcagcctgttggcgaacgctggcggcaacctcaccaacagtgggttgatggaagccggtggccgcctcgacctgctcagcggtaacaacctgaccaaccgcgcgggcggtgtgatcagcgcgggcaacgtcaacctcgccgccggcgccgacctgctcaacgaacgcagcgtcaccacccacgcaagcgccagcagctaccgcaccgaacgccgcgacttcgtcgacagcgccgcacgcatcgaatcggccaacgatttgaccctgcaagccgggggcaatttcaacaacgtcggcggcgtgctcaagagcggtgccgacaccacggtcaaggccgtgggcgacatcaacatcaccgcctcgaaaaccctcgacagcggcgccatcggcaaccgttccagcttcaccaccatcgcccagcaaggctccgtggtcgacgctggccgcgacctgcatgtgattggcgggcgcgatatcagcgccgtggccagccaggtcgaagccaagcgcgacgccaacctgattgccacccgcgacttcaacgctgttgcggcggccaacgagcagcactccacgggcaacacaaaaaaggtcaagagcatcgaagaccacgtgcagcaagtgtccagcgtgatcaaggccggcggcgacgccaccctgagcgccgggcagaacctgcaactggtcgccagccaggtgaatgccggcaacgaggcgtacctggtgtccggtaagaaccttgagctcaaagccgcgcaagaccaggactacagcttctacagcaagaccaagaaaacctcccagggcaaaaaattccgcctggatgaaaccgatgccgtgaacaacgtcggcagcttggtcagcgctggcaaaaacagcaccgtcgtcgcgggtgcagacctgctgttggccggcagtgctgtcaccgcagaaaaaggcgcggcacgattagtcgccgcgaacgatgtgcaggttctggccgtcagcgattctgaaaagtcccgccacgaacgcaaggaaagcaaaagcagttggggtggcttcaagtccagcaaggtccaggacaaagtggatgaagccagtaccaccgcagtgggcagcatggtgtctggcgacacggtaagcgttgccagcggacgggacgtgaaagtcaccggttcctcccttgttagcacgggtgacctcgccgtgcaggccggccgagacctgacaatcgacgcggcgcagaacaccttcgcccgcaccgacatgcacaaggaaaaaaatcgcaacctcaccggcgtgctgaccggtaacaagctcggtctggatgacatgaccggcaaccagaagctgtacatcaatagctcgaaacacaacggcactgcaaacgagacaactttgctggggagtacggttgggtccagcgccggcaatgtaaatctggtcgccggacgtgaactgaaggtagtcgccagtgatttggtgagtacgaaggacatgtcgttaagcggctcgaatgtcaccattgcagccggcacagaaacggctaaccaaactagtaaggacagctccaggagcttggcagtaggccgggttattggtggcgtggcggtggatacctataagagcattcgcaatgacgttcgggctgcccaacaggctgacgacagtcgtctgaaggccgtcaaaggtgcccaggcgttactgtcgacctacgatgcgctgggtggcagtaatgacgcggccaatgagtcagatggcaagcctgccaacagcgctggttcggtgttcaagattgggaccgaactcgcgtctacgcacaaaaaaagcaccagcgaatacaacgccgaaacggtgaagcaatcgaccgtgaacagtggcggcagcttggcaatcgtcgcaagcgggaatgcgcagggcaccgcaggcgacttgcatatcatcggcagcagcatcaaggctaaagacacactgttgcaggccaagaacaacgcgattctggaaagcgcccaggatcggagaaactgggataaccagaataaaaataacaagaccagtgtcggcgtcagcctcagcttcggtgagcagagcggctttgtgctcgacttgggtgctcagatggccaagggcatgggtgccgggcatgaaatcacacaagtcaatagcacggtggataccggactgctcgttcttaaaactggtcaggacgctaccctggcaggcgcgcaggtacatgcagacgcgataaaggcgcaggttggcggcaatctgaatattgcctcgcgtcaggacgaagccagccagaagaacaagcaaaccagtggcggcgctggcgtgagtatttgcgtgccgcccttctgtctggggtccatggtttcgggcagtgccaatattgctggcagtaaaatgaacagcgattacaaggctgtggcccaacagtccggtctgtatgcgggcaaaggtggatacgacatcaatgtcggcaagaacaccacccttcaaggtgcggtgatcgccagcgaagccagcaacgacaagaactacttgagtactgaccgactattggtcagcgacatcaaaaacaaaagcgatatcaaaagccagtccgcgagcctgagctattccggcgcaaccgccggtttcgaagacgctcgctcaggggttggtggcgcgattccgctgttgctcaaggagtctgatagcagtaagacccgcagcgcaatcagccctggaacgatcgacgtaagaagcgcggacggggctaatgatctgatcggcctgaaccgtgataccgcgaatgccaacaaactgctcgaccggcctgatgagaaggccatgcaagagcgtattgacctgatccaaagttcggcgcaactgtcgagcagcgtaatcaacaaggttgccgaggccaaggcgagtaaagccgcagcattgagcaagcaggcagatgaacaggcagaggcgggttctcctgatgctgagcggacggcgctggcggcgaatgcggcgtatctggatgccaagagttggcaggtgggtggtgacaaacgtctgatggcggatatcacttccggtttgattgcggccggattgggcggagcgacgggaagtaccgctgccggtattgttgcgaacacatcgtccagtgacatcttcaacagaatcggcacttttgccgatgctcagaaaaatcgtaaagatattgatgacgcgacaagggctgcgtgggctgaaggcggcgccgcgcgcgttttactgcacgcactgaccggtgcggcgcttggcctgtccagcgggaatgtacaaagtgccgcactcggcgtcggcgcctccgctgcgcttatgccgtccattggtgaggctctgaaaggaagcgagctgagtgaggcagagcaaggtgcgctttcgaccttgattgctacgagtctgggggcttcgattgggtcagccaacggagtcagtggctcggttgtagccggtagcggagcagcggcagttgaccttaacaaccgccagctacacgccatcgaaatcaatcgaatcaaggcgctcgcaggaaagttcgcggaagaaaaagacatatccctggaggctgctgaagccaggcttctcgcccaggcgcagcagaatgtcgataaggattttgcgactgaccattcgatggttgacctcagcgcaatgtcttttctacgttcccaggcagctacgtttgtagacgaaagcgggcgcacgatgttgatgtttgcccccggcggtaaagacgcctacgaagatgcggggatgtatggtcatacctggaatcagtttacgactgagcaacaggcgatgctgggtgcagcctcaaacaagaaccagtcccaaaaagacagcgaaatatgggatgcaacacgcagcactgcccttggaggcctaggtaaaggcgttgtgaactatcctagcgatgccttgaatgggatcatcgacttcgggaagcagtttctacacctggatgaagtgggtaaggaagttgttccggtacctttggattacgacaacccagtcgagcgagaggttgccagcggtacgcagcgtctgatagataacgcgatgatggtgttgggggcagcatggtcgtcggttagcgcaaaagtgcctgtaactgatgcactgtctggtgaaacaaaggtagtaggtggcggtacagcagcggctaacgatgcgagtgttacaggtgcaaaaggcaaaactgcatcaaatgaaccaaactctcagcctgtagcagaaaatggcggtgcgtcaccaaaacaaactgaaacctatttcagggttgaatcaggtggttcaggattccagactagccaaaatcgcatttctgtgaaatctgatgggacggtagcgattgattctggatgcagtggtcagttatgtgtcagtacaaatggccccagccatgctgcgtattatctttctaataaaaggcctgacggtaacgtggttgtttttgaggttgatcaatcgttgcaccaaaaaatcatgtccgaagctattgatcaacgacctttgcccggtcagacaaggaaccctaacgcccccaaaatcgttgatccgaatcaagggaagccaagtgtttcactagaactcccaaaagtatgggattccttgcttgagaaacactcatcaaatgcacgagtattgacgcaggaggagttctttcatgagtttggacgctaagtttgacgtattagaaagtgagttgtttgaagggcaaaaatcaattgctctgtttgttttgaaagagcagcattattatgttgtggatgataaatctaattactgtatcgatgtccggccggattatttttcgtatgttgaagcaggtcgactaaagcaggaagattatgaaaaagctcttaagctctttcgcggtggaatctcagttttaagcgcagataattttcatcagtacatcgatagcaccgaagctgaagtgataagttctacgatgatgaaagatttcttttccaagggcttaacgttgaagagtgctaagagtttttataaggacgtagagcggttcttatcttatggaggagaaatggattcgcgaaaatggaattttttgcgtatgaaattaccgagcttttacataaatttcgaccgagggatttaccgacataccgactatggtcggttgcatgaggaattggcgttgccaaaaacacagtgggatgctcgttgtagtagcgattttggattgctcatccctgacgatgatcaatattggatcgtagatagaatgaatttctggaagctttatggtggttgaattactcgaaagcttatatgtggtctcggttcgaatttttctattttctttaagatttagttggtacaaaagagactgcatctggcttggtttctggagaaacaggtgttgtaagtaacggaaaagttgctgttaacgacgcgaggttcgatggtgcaaaagggccgaggcagcttatctctgatgcaatcaaccctcccaaggtcagcccggttgagaaaataggggtcagaccccgattagtgcaccaatgtatattggtggtctgacccctatttcctgctaatttatgagaccaactaatatggattatgcgtttctctttgcaacgcttcagagtcagttggtgcttgcgttcgccgaactgcaccccaatgcaaaagattctacctggctcctcgacttcccgaagaggggagacttgcttgttgatggtgatcaatggcaatttctgaggcatggtgcaggtattcgttttgaaagagtgtcgcgtaaaccccattgggtcgtggatgttcataaacgctttgatgagccgaaaataatcgacaattggcgagtgcttcattttcttgaatcgtgcggggtaaacgtgaatgaagaccaagtgtcatcgttattaaataagttgtgtttaaaaggtcatttgcttgatcaaggtaatgggcagtttctatttgtcgactaatcacgagcaaggagtgcttgatgagtttgaaaaacgacttgaatgatgtgcttcataatatttctgaagggcaaaaaggagaaaaggtgacagatttatttaataagggcaaaaaagtggacggatttatttgattttcgagtccttttttaattaaataaatctgtcaccttttcgcactattggtggcgcacgtactgatattcctggacttgaaacgcaagggggaataggggggaaaatagggggcagaccacgattagtgcaccaatatatattggtggtctgacccctatttccatattaatggtctgacccctattttccatggagccaaaaaaggagggttttaatcgtgagcgactcagcttcaattatatcggatgtggcaattgatgaagatgcgtttgctgattttattcactctataggcggggtcgttagtgccggaaaacgtaatcgtggagtattgaattgggacgacgccactttgtatatttcattactcaactccgaaaaattcatgaatttttatgattcgcaagatatgctcgattgggaagatttgttgggtgaccctcctaagacaatgatcgaaatgcaattgggtcattcggaaggctcgatggagatgtatttatggttggcgtacgagtttggcaagaaatggaattgtgttgtagatgacgttagtgcggtgacgcttaactactccgaagtctgtgacaggtacacaaggtcgactatgaaatagcagaaaatagggggcagaccttgagtgatgggggacagaccaccttggcaatgaaatttaggtattcaataaatcacccataaccgcttgagatgtgagcctaggagtcatcttgaagatccttttgctggcccttttttctgctctattactgagtggctgcggctctgcacgctatgaaaaacctatcccctacgatcaggccaccaccgcacgcatccgactttttgggaataacggtttgcctatcgccatcaaccccggacaagactgcgcgtcgagtaaagaacctctttttgcctacggttataccgttgcggataaggtcaattccaccttggggcaacacaccaagcgaagtatcggaatgcccgcttcctggaggagcgagcacctgagctatggcgagtcttatgccgagtttgtgatccctgcgggtgtgccgtctgtggttgtgatgaagatggttgccgccgaggcgtcttgtgtgcctgatccacgtgtatttgttcctgaggcgggtaaagattatgaggcgtacctacagaggcaagactggcagtgcggtggcgtgattcgactgctctctggtcaggagacgcctggtgctattgcacacgttccgtcgaatagttgcgggagaaaataaaggtaactggcgaagcgcaaagaaggggagagtctcatttaataattacttgccgctcaggagaaaatccgggccagaccacattttgtacaaacccggacacgggatcacagtgatggcacaatgcctcatgtaacgccatccactgccgacacactggcgatggccaaacgcatcaggaaaaggtgaaccggccgtcgtcggcgttttcgaaaccgccccaccgctacccacaaggaagaaatacatgatcaagttgttctgcaaagccgctgttgctctgtccctcgtcactctgtttggctgctcctcgacgccgtcggtggagaagatgcaggccgatgtggcgaactattcgttgcctaaggctgctgtcgccgataaaggtttggtgtatgtggtgcgcccgagcaacgtggggatgatggttcgcttcaacgtgttcctggatgacaaggaagccgactcggagatgggttacaaccgcggtaaccagtacatctattttttcgtgacaccgggcaagcacgtaatcagttccaaggctgaaaactgggcggacatgccgattgatgtcaaggcgggtcaggtggtttacctcaagcaggaagtcgacatgggcttcgccatcgcacgcaacagcctcaaagtgctgagcgacctcgaaggccgttacctggtcaaagatgcgtccctgggcaccgtggcaaaagaaagcaagtgagttaaaccgttgaagcctgccgggctccaggtccggcaggccgtcatttttcaccctgcgcaaacgttcaaggactgatgtgaaaaacctcctcttcatcctatttgccacccttatcctcggcggctgtgtcagccatccccttacgcccgaacaccgggcccagatcaagacggtcaaggtgctgccggtaaagtgggagtcgcaacagatggtctacatgggccgtgagcaagcctggggcgcagcattgggggccgggcttggcgcgggcgttggcatggccagcggtgcatccaggttgggcacggcggcgttgagcggcgccgggtttgcagggggtatgaaacttgggcagttggccgagatgccgacgccggtagcgatccttacggtgatggacgctgaaaaaatcgatttgggcgtgttgctcaaacagggctttatcgatgcgttgggtaagacctcaaccctcaaagtggtgggtgacgatgaacccgccgatgcgcagatccagctgaccgtggccgagtggggctttcgcctgacccaagggttcagcagtgtggtgtaccccaccctcaatgtgctggcgcagatgaatcgcggcgatgaaatggtctggcgcaccagcgaggcggtcacgccgttcaatggccagaacgtctacggctacacgccgctcacctatcgcaccgaccccgaggcgttgcgccgcgcgctcacggggattacgcagatctccagtgggtatttggtgaaagagctcaaataagccagcgcgtgcgttaatgctggcctgcccctgtttcccgattccacggacgcatgacatgaaaaaagcaattgttctactggcaatcaccggcctcgtcaccgggtgtcaagcttccaggccgccaagctcctttgagcagagtctggccaacgttcaatgcatgctgtccgagggcgagaaaagccccacagccgatcaggttcagttcattcgtcaagccagcgataacggcaacgtgcgctgtaagactgcgctcggtggtttgtacgaatccggtcgtggcggcgtgccacaagattttgccaaggccagatcgctttatgagtccgttgccgccgtggatggcgtcggttacgaaaggctggcgcgcatggccgaggagggccacgggcaagtgcgcaacgatgtggaggcgcgacggctttatcagttggcgctgaccaacagcgacagcgataaaagcaaactcgccttggcccgattgatggaagagggtcgaggtggcccgcaggatttgttcggggccatgatgtattacgtggaggccagccagcatgccggcgatgtcgcgtggaagggccttcagcgcattcgcgctcaacgaccggtgctgacgcctgaacaagcacagcgctacaacgaggtctgggctgacaccagtcgcaagagcctcaatcgtacggcactggacatcgagattgccttgaacaagcaaatcaaacgcggcagcgcgagcaagccggtgacgctgcaagtgcaaggccagtcgggttcgaatgtgccgaaaatcctattgatcgaaagctcgggcaacgccgaggtagaccaggccgtggtcaacgcattcggtcaataccgcattcctgccgagccgctattgcaggcaggccaggactcctggtcgtccgagcggtctctcaaggtcggtttgaattgaagggctggagccctgatgccatgggccgttcacattcaacgcagacacgaacaccttgaatctggagcaacaccgtatggatgcaagcaacacccctgaacgcccgaccgtcctggccagcatcggtcgtcgcctggctgcacgggtcatcgactgtgccagcgttcgcagcctcgcggatatttatgacaatggcagagggtaaggacgttatgaacgactcagtagcgactaaagaaacctgggacctcgccagcccgttcagacggttactcggctatttcatcgatatggccgtggtgttgttcctgctgtttttgaacagaagcctgggctctgtctatctggacgccgcagcaggctcggcattgctcaatggcctgcactacgcattgttgttcctggccttcgggtacggcttgttctgcgatgcgctacccaatggccagagcttgggtaagcgtgtatgccgcacggcggtggtggggtacccgtaccccatgaactgcacgctgttccagtcgttcctgcgcaatgcgccgaaattgctgttcagcgtattggatggtctttttgtgttgttcggcatgcgtcgtcgtttgggcgatatgttggccaagacggttgtgatcaatacgtaggcagaatgatggcctggagccagcattcttttgttttgcggacaaggccttagcgttgcttacctgccttgtcgggcaaaacgccagtaacacggcgccgctcgagctgtaaaacagcttgagaacgcctttcaactccgtagaatgccgcgattgtttaaagcacgatacttttcagggacgaattcagacatgcgcgtgtttgccgtacttatcgcggcctgcctactggcgggctgtgcctccaagccggattactacatctccccggcgccggtaacgattccgaagactgctacttactggctcgacaacttcgatgttgaggtggaggggcagaacgatcgcttcatgtcggacgataaagtccgcgaacaattgggcattgacctgattaaccgcctgcttaaagccaagcgatacgccaccagcaaggcttccgccgattacctgctcgatgtgaaagtcgtctacaaacgactcatccaggatacgcacggcgcgctcgtcagcacgatcatcgaagacaacaagtacttggtctcggttgatttcagctatgaggtcaaggtcaagaaaggcgataccgaagtcctgcattttgcgcagacgcgcgaacgcctcatgccgagtatggggccgggacaatggcaacactggaagaccgttggcggtattttgacccgtagcggcaactcaaatgtcgaggggttttataccggtaatttgagcagtttcatcgccaccgatctccgtaacattccatcccgttagtttcatccgctttaaccgatttatcacccaggagcaccctgtgaacacactgtccaaaatcctgctgtccggcctcaccgccgcagcgctgctgaccgtggccggttgcgccacggagagcaaccgtgcgatgccggtggagcaagtcgccagcgccaacgtcgcttattccggcgtgcgcgtgccgattgccgtgggcaagttcgacaaccgctccagctacatgcgcggcatcttctccgacggcgtcgaccgcctcggcggccaggccaagaccatcctgatcacccacctgcagcagaccaaccgcttcagcgtgctggaccgcgacaacatgggcgaaatctcccaggaagccgcgatcaaaggcaccgtgcagaagctcaagggcgctgactacgtggtgaccggcgacgtgaccgagtttggccgcaaggaaaccggcgaccgccagctgttcggcattctcggccgtggcaagacccaagtggcctacgccaaagtcgcgttgaatatcgtcaacatcagcacctccgaagtggtgtattccacccagggcgccggtgaatacgcgctgtccaaccgtgaagtggtcggcttcggcggcaccgccagctacgactccaccctcaatggcaaggtcctcgacctggccatgcgcgaagccatcaaccgcctcgtcgacggcatcaatgccggcgcctggaacccgcgcaactgatcagcagcacctcaaggagcagtacaaggatgagcaaggcagtcaagttggcgctgatgctgacagcagtggcgacggtcgccgggtgccaaaccgcgccccagccgttgtatcaatgggaaagttatcagccgcaggtttacgaatacttcaagggtgagcccaaggaagcgcagatcgaggcactggagcgtgatctgcagaagatcaacgccagcggccgcaaagccccgccgggttaccacgcccacctgggcatgctttacctgagcatgggcaaggatgaccagatggtgcaggagtttcgcaccgagaaggcgctgttccctgaatccgcctcgtacatggactttctgctgaaaaacgccaagaccggagtcgccactaaatgagcctgttgaaacttacgggcgccttgctggccctggccctgctcggcggttgcgcagcccccaagaccattgattacacggcgtacaagcaggcacgaccgaagtcgatcctagtactgccgccgcttaatgagtcgccggaagtgcaggcgtcctacagcctggtctcgcaagtgacctacccgttggcggaagccggctactacgtgctgccgatagctctggtggacgaaaccttccgccagaacggcctgaccacggccaacgatatccaggccctgccaccgaccaagctgcatgacatcttcggtgcggacgccgcgctgtacatcaccgtcaccgagtacggcaccaagtacatgctgatctccagtgacaccgccgtgacggcttcggccaaactggtggacctgcgtaccggcaccaccctgtggaccggctcggcgcgggcatccagcgaagagggcaacaacaacagcggcggcctcgtcggcatgctgatcacggcggcagtcaagcaggtgatcaacagctccaccgatgcggcgcacccgattgccggtatcaccagtgcgcgcctgctgtcaccggggcaacgtgcggggatcctgtacggtccgcgtaaccccaaatacggcacggactgagttcatgtgggaggaggcttgcccccgatagcggtagatcagtcagtacatgtttgactgacccaccccatcgggggcaagccccctcccacagttggactgttatttgaatcagggttaacccgaacatcccgcacctcgcgtctgaccttgtgaacggatcatttcattcacgaggttcagcccatgtcccgtcctctgctcttcctgcgtcctgctgcccagggctttgcggttaccgtactggtaacgctggccgggtgtgggctgtcctcttcgcctgagctggccaagccggccgaacccatcgccgagctgcaaagcgcgccaccccagggtgcgttggtcaaacgcatggcaatgcctgcaccgatgcgtatgcaggagtcagccgcgatggactaccgcagcgaaccccgcgaacaatatgaaaacctgccggacaacccggtgcaccgcgtggccgagacgccggtgtccaccttcagcgtcgacgtcgataccggcagctacgccaacgtcaggcgtttcctcaaccaaggcagccttccgcccgaaggcgctgtgcgactggaggagatggtcaactatttcccctaccactacgcgctgcccaccgatggctcgccctttggcgtgaccaccgaagtcgccgccacgccgtggaacccgcatacccagttgctgcgcatcggcatcaaggcgtccgaccgcgccgtggcgcaattggcaccggccaacctggtgttcctggtggatgtgtccggctccatggaccgccgcgaaggcttgccgctggtgaaaagcacgctgaagttgctggtggatcaattgcgcgaccaggaccacgtttcgctggtggtgtatgccggtgaatcccgtttggtgctcaagcccacctccgggcgcgacaaggccaagatccgcaacgccatcgaccaactcaccgccggcggctccacggcgggcgcgtccggtatcgaactggcctaccagatggcccgcgaaggctttatcgacaagggtatcaaccgcatcctgctggccaccgacggtgacttcaacgtgggcatcagtgatttcgacagcctcaagcaaatggcggtagaacagcgcaaaagcggcgtgtccctcaccaccctgggcttcggtgtggataactacaacgaacacctgatggagcaactggccgatgccggcgacggcaactacgcctatatcgacaacctgcgcgaagcgcgcaaggtgctggtggatcagctcagctcgaccttggccgtggtcgcgcgggatgtgaagttgcaggtggaattcaacccggcgcgtgtcagcgaatatcgcttgcttggctatgaaaaccgcgccttgaagcgtgaggatttcaataacgacaaggtcgacgccggtgagattggcgcagggcatacggtcacggcactgtacgaaattgtgccgaagggcgagaaggggtggttggagcctctgcgttacgccactgcgcctgtggccggggataaatccgctgaactggcgatgctgcgggtgcgctacaagcctgctgtggacggtgccagccaactgatcgaacggcccatcagccaggaaccctccaaagccagtgacgacctgcgctttgcggcggcagtggctgcctttgcccaacagctcaagggcgatggccgctacactggcagcatgagcctgcaggacaccgccgcactggcccgctcggcccggggtgatgacccgttcggcttgcgcaacgagttcgtgcaactggtcgaactggcccaaagcctcaaaccctgatcatagccatgacaacaatcaaatgtgggagggggcttgcctccgatggcggtgtatcagcatcaagtgtgctactgacccactgctatcgggggcaagccccctcccacagttagaccagcttcggctgataaaaaggagttcgccccctacatggctgttccagatgatctacccagcgacgaatcgctgctggcccgctaccgcaccggcgacagcgccgcgttcgaagccttgtacgcacggcaccgccagggcctgtaccgattccttgtgtccttgagcaacaaggccgaactggccgaggaaatctaccaggagacctggctcagtctgatccgcagcgccacccagccacaaggccgggcgagttttcgcacctggctgttccagatcgcccgcaaccgcctgatcgaccactggcgcaagcacggtgtccataacccattgcacgacagctacgacgaacaattgcatgcccaggccgacgacagcgccggccccgagcagcaactgagcctgagccgcgaccaggcgcggctcgatgccgcgctgcaagacctgcccgaagaccagcgcgaagtcttcctgttgcgcctgcacggcgacctcgaggtgccgcaaatcgccgccctcaccaacgccccgctggaaaccgtgaaaagccgcctgcgttacgcccagcagaaactgcgccgcctgctggccgaggagatacccgcatgatcgactcccgaaacactccagattccgacgacgaattgttccagcactatcgtcaacacagctccgtcgagccgccggcgtccctcgacgccttcatcctcaacgccgcccgccgcgaagccccggcgccgcagccgaacctgtggcaacgctggctgcaagcctgccaacggccgcgctggcagatggcattcgccaccgttgcagggttggccctgatgatcggcgtggtgatgcgctcgcctgtgccgcagcccgacatttccaccgcgaccttctctgcgctgcacgacgaagcaccgcgtcccgcggcacccgcgatgtccgcgcctgcccccgtcgcccgaatggccgccgcgccccaggcagagagcgcgcaagtcatgggttcgatggcggatgagtccagcgccaaattcagcaagcgtgcgccggtggcgttgccttcgttggaggaggggttgcaggagattgttaggttgcgtgaagtgggagaaagcaaggcggcagatgaatacctgctggcactctacaagcgtttccccgaagaagatttgcctgcgcggttggaggcactgcaaaagcgttaggcggatgcggctggtttgaactctccgcagagttaatacaaaaaaagccccaggcctttcgacctggggctttttcatctgtatatggtgcacccggcgggattcgaacccacgacccctgccttcggagggcagtactctatccagctgagctacggatgcttgtgcgggcgacatcatacccatgtcgaccttgggcgtccatgctggtctttgggcatccaagtgtaggaattcgctgcataaaggccctgggccgggcaccactcatcagaagggtagaacccggaccaacgacgctgatcagaaagatcgactaaaagcgccgttttcgttctttttttcgaacagactattgccctgcccccccattgatcctaggattcgtttgagatttcaaacgctctgtctcccgcgcgctattcacgctatcccgcgtgctggggctgatttccctgacggcagcccacaaggcgcctttcaacaactctaattcgctccgcgtgcgcgcggtgctgttaaggaaacccgacatgcagctcaaagatacccagttgttccgccagcaagcctttatcgatggcgcttgggtcgatgcggacaatggacagaccatcaaggtcaacaacccggccacgggcgagattcttggcaccgtgccgaagatgggcgccgctgaaacccgccgcgccatcgaagccgccgacaaggccctgccggcctggcgtgcactgaccgccaaggagcgcgccaacaagctccgccgttggttcgaactgctgatcgaaaaccaggaagacctcggtcgcctgatgaccctcgagcaaggcaagccactggccgaagccaagggtgaaatcgtctacgccgcctcctttatcgagtggttcgccgaagaagccaagcgcatctacggcgatgtgatcccgggccaccagccggacaagcgcctgatcgtgatcaagcagccgatcggcgtgaccgccgcgatcaccccgtggaacttccccgctgcgatgatcacccgtaaagccggcccggccctggccgccggttgcaccatggtgatcaagcctgcttcgcaaaccccgttctcggccttggccctggttgaactggcgcaccgtgccggtatcccgaaaggcgtgttgagcgtggtcaccggcagtgccggcgacatcggcggcgagctgaccagcaacccgatcgtgcgtaaattgtccttcaccggctcgaccgaaatcggtcgccagctgatggccgaatgcgccaaggacatcaagaaagtttccctggagctgggcggcaacgcgccgttcatcgtgttcgacgacgctgacctggataaggccgtcgaaggcgcgatcatctccaagtaccgcaacaacggccagacctgcgtctgcgccaaccgcctgtacatccaggactcggtgtacgacgcgttcgccgagaagctgaaagtggcagtggccaaattgaagatcggcaacggtctggaagaaggcaccaccaccggcccgttgatcgacgaaaaagccgtggccaaggtgcaggaacatatcgctgacgccctgagcaaaggcgccaagctgctggccggtggcaaagtgatggaaggcaacttcttcgaaccgaccattttggtcgacgtgccgaaaaacgcggccgtggcgaaggaagaaacctttggcccactggcgccgctgttccgcttcaaagacgaagccgaagtgatcgcgatgtccaacgacaccgagttcggcctggcgtcctacttctatgcccgcgacctgggccgtgtgttccgtgtggctgaagccctggagtacggcatggtcggcgtcaacaccgggttgatctccaacgaagtggcgccgttcggcggcatcaaggcctcgggcctgggccgtgaaggctccaagtacgggatcgaggattacctggaaatcaaatacctctgcctgggcatctgacccggcaagagcttgcagcaaacgcaaagggcacgagagcgctgaccctttgcgtgttttaccccgcaattcgtagtgaccgggaaagctgtggcagtcgatcatcgcatgctgccgtagttgcctccccgccacgtattccttggaccacgccacccgatgagtggcgaatgaggactttatgagcaagaccaacgcatccctgatgaaacgccgcgaagccgctgtaccgcgcggtgttggccagattcacccgatctttgccgaatcggcgaagaacgccaccgtgaccgacgttgaaggtcgcgagttcatcgacttcgccggcggcatcgccgtgctgaacaccggccacgtgcacccgaaaatcatcgccgccgtgaccgagcaactgaacaaactgactcacacctgcttccaggtactggcctatgagccttacgtggaactgtgcgagaaagtgaacgccaaggtcccaggcgatttcgccaagaaaaccctgctggtcaccaccggttccgaagccgtggaaaacgccgtgaaaatcgcgcgtgccgccacggggcgtgccggtgtgatcgccttcaccggcgcctaccacggccgcaccatgatgaccctgggcctcaccggtaaagtcgtgccttactcggccggcatgggcctgatgccaggcggcgtgttccgcgcgttgttcccgaacgatctgcacggcgtgagcgatgacgattccatcgccagcatcgaacgcatcttcaagaacgatgccgagccgcgtgatatcgctgccatcatcatcgagccggtgcagggcgaaggcggtttctacgtcgcgccgaaatccttcatgaagcgcctgcgcgaactgtgcgacaagcacggcatcctgctgatcgccgacgaagtgcaaaccggtgccggccgtaccggtacgttcttcgccatggaacagatgggcgttgctgccgacctgaccaccttcgccaaatccatcgctggcggcttcccgctggccggtgtgtgcggcaaggctgaatacatggacgccatcgcgccaggcggcctgggcggcacctacgccggtagcccgatcgcttgtgcagctgcgctggcggtgatggaagtgttcgaagaagagcacctgcttgaccgctgcaaggcagttggcgagcgtctggtgaccggcctcaaagccatccaggccaagtacccggtgatcggcgaagtgcgtgccttgggtgcgatgatcgcggtcgagctgttcgacgacggtgacacccacaagccaaacgcggcagctgttgcttccgtggtggccaaggcgcgtgacaagggcctgatcctgctgagctgcggcacctacggcaacgtgttgcgtgtactggtcccgctgacctcgccggacgagcagttggacaaaggcctggcgatcatcgaagagtgcttctccgagctgtaagagaaagttgacctgttcgacagaaaaaacccgcttcggcgggttaatgagatggtcacccccaacaccctgtgagggctacgctttcacagggtgttttgttttcggaggccatcatcatgagcgagtcagcactgatcgggatcgatctcggcaaaca

SEQ ID NO: 61 - DNA, 70907 bp, Pseudomonas nodulensis
  misc_feature (47238)..(47338): n is a, c, g, or t
aagccccctcccacaggggaatgcattccaaatgtgggagggggcttgcccccgataggtccggcagagctgcacaaaaattcaagaaggtatgaagatgccccaggcaacaaaaatcaccatcgccaacgccccgctgcgctggcaggacgtcgtcgccgtcgcccgccacggcgcggtgctcgaactctcgggccaggcctgggcgcgcatcgacaatgcccaggccatcgtgcagcgcatcgtcaccagcggtgagcgcgcctatggcgtgaacaccggcctgggcgcgctgtgcaatgtgtcgctcaagggcgagcaactcagccaactctcgcgcaacaccttgctcagccacgcctgtggcgtcggcccggtgttgagcgacgaacagacccgcgcgatcatctgcgccgccatcatcaactacagccacggcaaatccggcctgcatccgcaggtggtgcattcgctgctggcgctgctcaaccacggcatcacgccgcaagtgccgtcccagggctcggtgggttacctgacccatatggcccatgttggcgtggcgctgctgggtgtgggcaatgtgagttaccaaggtcggatcgttccggctcaagaggcattgaacgcggaaggtctgcagccggtggtgctcggcgccaaggacggtctgtgcctggtcaacggcacgccgtgcatgactggcctgagctgtctggccctggccgacgcgcatcacttgctgcaatgggccgacgtgatcggcgccatgagcttcgaagcccagcgtggtcagatcgatgccttcgatgaagaaatcatcgccctcaagccgcaccccggcatgcagcaagtgggtatcaacctgcgcgccctgcttgatggcagcgaagtgatcgccagcagcaagggcattcgcacacaggatgcgttaagcattcgctcgatcccgcagatccatggcgcggcacgcgaccaggtagagcacgccacgcgccagatcgagactgaactcaacagcgccaccgacaacccgctggtgctcggcacaccggaacactaccgcgtggtgtcccaggccaacccgcatggccagtccgtggccttggcggcggacatgctggcgattgccatggccgaaatcggcgcggtggccgaacgtcgcctggaccgcctgatcaacccgcacgtcagcggcttgccggcgttcctggtcagcaaccctggggtcaactccgggatgatgatcgtgcagtacgtcgccgcctcgctgtgcgggcaaaaccgccaattggcgcaaccggcggtgctcgacaacttcgtcacctcgggcctgcaggaagaccacctgagcatgggcaccaatgcggcgctcaagctgcaccaggtgctggccaacgtgacccagattctcgccatcgagtacttgttggcggcccaggcgttcgagtttctcaaggaacaacgtttcggcgtcggcaccgaacgtgcctggcgtctgctgcgcgacgtcgtgccggcctatgaacaggaccgttggctggcgccggacattgccgccgccgctcaactgctgaaaaacaccgatttaccgaatgtgcacttttaaaagaacaattcagaaggagtatgaatgtgactgcgctaaacctgattccaggccaactgagccttgcccaactgcgagccatctaccagcagccggtaaccctcagtctggatgacagcgccacggcgcagatcgaagccagtgtggcctgcgtggagcagattctcgccgagaaccgcaccgcctacggtatcaacaccggtttcggcctgctggcctcgacccgcatcgccagcgaagacctggaaaaccttcagcgttcgctggtgctgtcccacgccgctggcgtcggtgagccgatcagcgatgcgctggtgcggttggtcatggtgctcaaggtcaacagcctgagccgtgggttctccggcattcgtcgacaggtgatcgacgcactgatcgcgctgatcaacgccgaggtgtacccgcatattccgctgaaaggttcggtgggtgcctccggcgacctggcgccgttggcgcacatgtccctggtgctgctgggcgaaggcaaggcacgctacaaaggcgagtggctggaagcgactgacgcgctgaaagtcgccggcctcacgccgctgacccttgccgccaaagaaggcctggcgctgctcaacggcacccaggtgtcgacggcctatgccctgcgtggcctgtttgaaggcgaagacctgttcgccggcgccctggcctgcggcggcctcaccgtggaggcggtgctgggttcgcgttcgccattcgatgcgcgcatccatgcggcacgcggccagcgcgggcagatcgattcggcggcagcctaccgtgacctgctcggcgacagcagccaggtgtcccagtcgcaccagaactgcgacaaggtgcaagacccgtactcgctgcgctgccagccacaagtcatgggcgcctgcctgacccagttccgccaggcagccgaagtgctggtggtcgaggccaacgccgtgtcggacaacccgctggtatttgccgctgaaggcgatgtgatctccggcggcaacttccacgccgaaccggtggccatggcggccgacaacatggcgctggccatcgccgagatcggctcgctgagtgagcgccgcatctcgttgatgatggacaagcacatgtcgcaactgccgccgttcctggtgggcaatggcggtgtgaactccggcttcatgatcgcccaggtgaccgctgccgcgctcgccagcgagaacaaggcgttgtctcatccccatagcgtcgacagcctgccgacctccgccaaccaggaagaccacgtgtcgatggccccggctgcgggcaaacgcctgtgggaaatggctgagaacacccgtggcattctcgcggttgagtggctggccgcgtgccagggcctggacctgcgcgaaggcctgaaaacttcgccgaagctggaaaaggcgcgtggcatcctgcgcagcaaagtggcgttctacgacaaggaccgctttttcgcgccggacatcaacgccgccagcgaactgctcgccactcgctgcctgaatgagctggtgccggccaagctgctgccgagcctgtaaccgccacaccctgtagtgagcgggcttgccccgcgctgggctgcgcagcagccccaaaaaactgccgccgcgttctgtctgaagaaatgcggtggcaacttcagggccgcttcgcagcccagcgcggggcaagcccgctcactacagttgtcaggcaactggctctaaattttctcaggataaaaataattaaggacgagaaatgcaccagcaagaaaaaggtttgaaacgcgggctcagcgcccgacatattcgcttcatggcactcggttccgcgatcggtaccgggttgttctatggctctgcctcggccatccagatggccggccccgctgtgctgctggcctacctgatcggcggcgccgccgtgttcatggtgatgcgcgccctcggcgaaatggccgtgcacaacccggtggccggctccttcggccagtacgccagcacctacctgggccccatggccgggtttatcctcggttggacctacgcgtttgaaatgatcatcgtgtgcctggccgacgtcaccgccttcggcatctacatgggcttctggtttcccgaggttgcgcgttgggtctgggtgctcggcattgtgtttttgatcggcggcctgaacctgtgcaacgtcaaagtgtttggtgaaatggagttctggctgtcgctgctcaaggtcggcgccatcgtggcgatgatcctcggcggcttcggcatcatgctgttcggcatccactcggccggtgagacccaggccagtggcctcagcaacctgtgggcccacggcggcttcatgcccaatggcatcggcggcctgatcgcttcgtttgcagtggtgatgtttgccttcggcggcatcgaaatcatcggcatcaccgccggcgaagccaaggacccgcagcgcgtgatccccaaggcgatcaacgcggtgccactgcgcatcctgttgttctacgtgctgaccctgttcgtgctgatggccatctatccgtggccgcagatcggcagccagggcagcccgttcgtgcagatcttcagcaacctgggcattggctcggcggcgaccatcctcaatatcgtggtgatctcggccgctgtttcggccatcaacagcgacatcttcggcgccggccgcatgatgtacggcctggcccagcaggggcaggcacccaagggcttcgcgcaactgtcgaaacacggtgtgccgtggatgactgtggtggtgatgggcgcagccttgctgggtggggtggtgctcaactacctgatcccggaaaacgtattcctgctgatcgcctcgattgccaccttcgccaccgtgtgggtgtggctgatgatcctgttcacccaggtcgccatgcgccgctcgatgaccaagcagcaagtcgctgagctgaagttcccggtgccgttctggccctatgcgccggcggccgccatcgtattcatgctgttcgtgtttggtgtgctgggttacttcccggacacccaggctgccttgctggtcggtgccgtatggatcgtgctgttggtggtggcctacctgctgtgggtcaaacccgctgccgggcaagcggccaaggtccattacgacccggctttgtctcatcgttaatctagggaggcgttgatgaaaacgctttggcaacactgccacgtcgcaaccatggcccagggcaagtactcgatcatcgaggatgccgccatggtcaccgcgggttcgctcatcgagtggatcggcccccgcagccaggcacccacggcggattacgcccaggtgcatgacctgcacggcgcgtgggtcacccccgggctgatcgactgccacacccacacggtgttcggcggtaaccgcagcggcgaattcgagcaacgcctcgaaggcgtcagctacgccgagatcgcggccaagggcggtggtattgccagcacggtgcgcgccactcgcgccgcaaccgaagatgagctgtttgccagtgctgaaaaacgcctgcgcagtctgctgcgtgatggcgtcaccaccgtggagatcaagtccggctacggcctggacctagccaacgaacgcaagatgctgcgtgtggcccgtcgcctcggtgaagcgctgccggtcagcgtgcgcgccacgtgcctggcggcccatgcgttgccgccggagtacaaggaccgcgccgacgactacatcgaccatatctgcgccgacatgctgccggccctggcggcggaagggctggtggacgcggtggatgcgttctgtgagtacctggcgttctccaccgaacaggtggagcgcgtgttcaaagttgcccagcaactcggcctgccggtgaaactgcacgccgagcagctctcttcgttgcacggttccagcctggccgcgcgttaccaggcattgtcggcggatcacctggaattcatgaccgaagaagatgccatcgccatggccgcttccggcaccgtcgcggtgttgctgccgggcgccttctacttcctgcgcgaaacccaattgccgccgatggaggccctgcgcaagcacggcgtgaaaattgccatcgccagcgacctcaaccccggtacttcgccggcgttgtcggtacgcctgatgctgaacatggcctgcaccctgttccgcatgaccccggaagaagccctggccggtgccacgcaacatgcggctaccgcattaggcatgggcgacacccacggttcgctggaggtgggcaaggtcgcggattttgtcgcttggcagattgatcgtcccgccgacctggcgtactggctgggtggcgagctggataaacgcgtcgtgcgccatggcgtcgacgccactgtatgaggagtactgcttgtggataaggttctgaacttcaaacaaggccgcgtgccgctgctgatcagcatgccccatgccggcctgcgcgtgacgcctgcggtcgaagccgggttgatccccgaggcgcaaagcctgccggataccgattggcacattcctgcgctgtatgacttcgccgaagagctgggcgccagcaccctggccgccgaatactcgcggtttatcatcgacctgaaccggccgtccgacgacaagccgttgtacgccggtgcgaccaccgggctgtacccggcgacgctgttcgacggcgtgccgttgttccgcgaagggctggagccgtcccaggaggaacgcgtcagctatctgcagaaaatctgggggccgtaccaccgtgccctgcaagaagagctagcacgcctcaaggccgaattcggctacgccttgctgttcgatgcacactcgatccgctcggtgatcccgcacctgttcgacggcaagctgccggacttcaaccttggcactttcaatggcgccgcgtgtgatcccgaattggccagccaattggaagccatttgcgccgcgcatccgcagtactcccatgtattgaacggacgcttcaagggcggccacatcactcggcattacggcgacccggcgcaggatatccacgcggtgcagttggagttgtgccagagcacttatatggaagaggttgagccgttccgatatcgccctgatttggccgagccgacgcgggtggtgctgaagcaattgctggaagggctattggcctgggggcaagcgcgttatcggtgaattgcggggctgctggaatagctatcgggggcaagccccctcccaccttttgatttatgaacccagtcaaatgtgggagggggcttgcccccgatggcggtctcaccgtcgccccagtgcaactgccggtcgccacagttcgtgttgaatgcattttcactgcgtaaggttgttgaataaaaacagccgagtgagcgctcatccatgaaaaaactgttgttgcccctcacctgtgtcgcactgctcagtgcacacgccatggccgccgaaccggcctcctgcaaaagcatccgcatgggcgtggtcagctggaccgatgtgatcgccacctccggcatggccgacgtgctgctcaatggcctgggctacgacagcaaacagaccagcgcggtgcagcagatcatcttcgccggcatccgcgacaagcgcctggacatcttcctcggctactggaaacccgcgatggacaacaacatcgcgccgttcctggcggccaggcaggtcaaggtcttcgacaccccgagcctcgccgacgcgcaggccaccctggccgtgccgcaatatgtggccgacgcgggcttgaagacctttgccgacatcgcccgcttcaaggacaagctcggcggcaagatctatggcatcgagccgggcagcggcgcgaacaccgatatccagaaaatgatcgacaccaaccgcttcggcctgggtggcttcaagctggtggcctcgggtgaggcgggcatgctcgccgccgtgcagcgcgcggtgaatcgcaaggagttcgtggtgttcgtcggttggaccccgcacccgatgaacatcaacatgaaaatggcctacctcaccggcagcgaagacgtgttcggccccgacgaaggccgtgccaccgtgtccaccgtcaccgcgccagacttcgccgagcgctgccccaacgccaaccgcctgttggaaaacctcaccttcaccgccgcccaggaaagccagttgatggtaccgatcatggagcgccagtcgccgcaggaggtggccaggcaatggttgcgtgatcatcccgaggatttgcagcgctggttggctggggtaaaggcatttgatggcggcgatggtgtagcggcggtgcaggcgagccttaaatgagtcgatacccgatctcgccggaactggcggcgtttgtggagaagacggagtccttcacgagcgacgacgcgtcgctggctgggttgcgccacagctacgaccgcatgtgccaggcgtttaccccgccggtgcccgacgggctggcgatgacggatttttccctggctggcgtgagtgtgcgcagttatctgcccgctgcccccgcgcccttggctggctggccgtgccttctttatatgcacggcggtggttgggtggtcggcgggctggattcccacgacttcatctgcttcgaattggccacggccttgcaggtgctggtaatcgccattgattaccgcttggcgcccgagcatccgtttccggcggcctatgaggattgccgcgccgtgtggcaggcgatccaggcggggcaggggccgcatgccatcaacctgcaacgcctggtggtgatcggcgacagcgcgggcggcaacctggccgcggcggtgtgcctggggttgcgcgacgaccggcagccactgccgctggcccaggtgctgatttacccggggctgggcggcccacctgaactgccgtcgcggcgcgactgtgcggatgcgcccttgctcagcagcgccgacactgagagttacctggcgctgtacctgcagggcagcggcaagcccacggcgtatgccatgccgctgctggtcgacgacttcagcggtttgcccaaggcattcattgccgtggcccagttcgacccgctgcgtgatgacggcatgctttacgccgagcgcctgcaagcggcgggtgtgagcagcgtgctgtatcccggcaaaggcctggtgcacggttgcctgagggcccggcggcacgtaccggaggtggaccggctctacgatttcctgctggattacctggggagcgaagggctgacacaggtctaagcgctctaggacatgctcattgcacaattcgggtttatagtgccagacggcaaaataaaagacgtccccccagggatgaacccgaccccttacggagcgcgcaatgcagacttggtacccgcagatcaaaccctacgcccggcacgatctggcagtcgatgacatccacacgctgtacgtcgatgaaagtggctcccccgaaggcttgcccgtcgtattcatccatggtggccctggttccggttgtgatgcgcagagccgctgctacttcgatcccaacctgtaccgcatcgtcacctttgaccagcgcggctgcgggcgctccaccccgcgcgccagcctggaaaacaacaccacctgggacctggtcgccgaccttgagcgcatccgcgagcacctgggcatcgaaaaatgggtattgttcggcggttcctggggctcgaccctgtccctggcctacgcgcaaacccacccggagcacgtgcatggcctgatcgtgcgcggcatcttcctggcccgcccgcaggacattcattggttctaccaggagggcgcgagccgcctgttcccggattactggcaggactacatcgcgccgatcccggtggaagagcgccacgacatgatcgcggcctaccacaagcgcctcaccggcaacgaccagatcgcccagatgcacgcggccaaggcctggtccggttgggaagggcgcatgttgggcctgtgcccgagcccggcgcacgtggagcgtttttccgagccgcaacgcgccctgtccatcgcgcggatcgagtgccactacttcaccaacaactcgttcctggagccgaaccagctgatccgcgatatgcacaagatcgcccatctgcctggcgtaatcatccatgggcgctacgatatgatctgccctttggataacgcctgggagttgcaccaggcgtggcccaacagtgagctgcaggtgattcgcgaagccggccatgcggcgtccgaacccggcatcaccgatgccttggtacgtgcgaccagcgaaatggcacggcgcttgctcgatctgccgcctgaagaagcatgaagggcctgttgcaacgggtgcgcggcgcccgggtcgaggtcgcgggcgaaatcgtcggcgccatcgaccagggtttgctggtgctggtggccgtcgagcctgcggatacgccggaaagtgccgataagctgctgcacaagctgctgaactaccgggtgttcagcgatgccgaaggcaagatgaacctgtcgttgaaggatatcgacggcggtttgttgctggtgtcgcagttcaccctggcggcggataccaagagcgggctgcggccgagcttctccacagcggcgccgccggccctgggagcggcgctttttgatcacttgctgttacaagcgcaacaattgcatggcaaggtggcgtcggggcgttttggcgcggatatgcaggtgcatttggtcaatgatggccctgtgaccttcctcttgcagacgtgaatgtattaaaaacgacttttaatgcctaaaaacgcagggtttcgctacaaatacttcgttgtccctgatgcgttgtctcgcgggctactagataatcgcgcgctacggggatcagcgttgtttggtccatttttgacttaggtagagacttgtccgatcgccaatggggaatcattttgccccaggggagtcggaacaatgctcgccaacctggcatatagatagctggccgttggttttttgatctgttttcggcgagggttgctcgtgattgttagtccctgtaatgcaccaaaattgtctgccaaacggttacgaaacgcactggtgacgggctccgccctgttttgcctgttcggcgcgggtcaactgtgggcattcagtctggatgatgtgtcggccaaggcaaaagagctggccgggcagaaatacgaagctccgcgcagcaatctgccgaacgaattccgcgaaatgaaattcgcggactaccagaagattcgtttccgcaacgaaaaagccgagtgggccgatcagaacaccccgttcaagctgtccttctatcaccagggtatgcacttcgatacaccggtgaaaatcaacgaagtcaccgccgacagcgtccaggaaatcaagtacgacccgacacgcttcgatttcggcgacgtgaagtttgatcccaaagccaccgaacagctgggttatgccggcttccgtgtgctgtacccgatcaacaaggccgacaagcaagacgaaatcatgaccatgctgggcgcgagctacttccgcgtggtcggcaagggccaggcctatggcttgtccgcccgtggcatggcaatcgacacagcactgccgtccggcgaagaattcccgcgtttcaccgagttctggatcgagcgtccaaagccgggtgagaaacaactggtgatctttgccctgctggactcgccgcgcgctaccggtgcttaccggctgatcctgcgtccgggcaccgacaccattgtcgacgtgaaatcccagatgttcctgcgcgacaaggtcagcaaactgggtgttgccccgttgaccagcatgtacctgttcggcgccaaccagccgtccaaagtgctcaactaccgccgtgagctgcacgattccagcggcctgtcgatccatgccggcaacggcgagtggatctggcgcccgctgaacaacccgaaacatctgtcggtcagcaacttcaccgtcgagaacccgcgtggtttcggcctgctgcaacgcggccgcgacttcagccactacgaagacctggacgacaactacgacaagcgcccaagcgcctggatcgagcctgaaggcgactggggcaagggcaccgtcaacctggtagagattccgaccgccgatgaaaccaacgacaacatcgttgcgttctggagcccggaaaaactgccggatgtgggccagccgctggacgtttcctaccgcctgcactggaccatggacgaaaaatccctgcacccggccgacagcgcctgggtcaagcagaccctgcgttccaccggtgacgtgaagcaatccaacctgatccgccagcctgacggcagcgtggcctacctggtggacttcgagggcccgtccctcaaggccctgccatcggatgccgcggtacgcagccaggtgagtgtcagcgacaacgccgaactggttgaaaacagcgtgcgctacaacgagcacaccaaaggctggcgcctgaccctgcgcatgaagatcaaggacgcaggcaagccaaccgaaatgcgtgcggcgctggtgcaggacgttccgcctccggcccctgagcaggacacgagccatgtgctcaaggccgacaaggtcctggccaagcaacacgagaaacaggccaagaaagacgcaaaagacaaggaagccaagcagccagaagctgccccagccacgccggagccgatcaagaccgaacaagtcctgaccgaaacctggagctatcagttgcctgccgatgagtaattctcaaatccagccggagactctgtcagagtacctggcgcatctgccgatgaccgctgagcagcgcgccgaactggcgggttgctcatccttcagcgagttgcacgagcgtttgtcgtcgaagaccttcgacgcgcccattgacgccgcccaggcgtcggttggcacgcggttgaccctcagcaccgccgaagagctgcaggacgccgaaatgctggccctcgacgccgagggccgcgtgtgcctcaaggctacgccgccgatccgtcgcactcgtgtggtcccggagccgtggcgcaccaatatcctggtgcgcggctggcgccggatcaccgggcgcagcaacccgccggccccgccgaaagatgagcgcgtattgccggctgcccgctggcgtaccgtcggttcgatccgccgctacatcctgctggtgctgatgatcggccagaccctcgtggccggctggtacatgaaaggcatcatgccgtaccagggctggtcgctggtcgacttcgacgagatccgcaaccagaccctgctgcaaaccgcgacccaggtactgccctacgccctgcaaaccagcatcctgatcatgttcgggatcttgttctgctgggtatcggccggtttctggaccgcgttgatgggcttcctggagttgctcaccggtcacgataaataccgcatctccggtaaaagcgccggcgacgagccgatcccgaaagacgcccgcaccgcgctggtgatgccgatctgcaacgaagacgtgccccgggtgtttgccggtttgcgtgcgacgttcgagtcggtcgccgctaccggtgacctggatcgcttcgacttcttcgtgctcagcgacagtaacgaggccgacatctgcatcgccgaacagcaagcctggcttgacgtgtgccgcgaagccggtggtttcggcaagatcttctatcgccgtcgtcgccgtcgcgtgaagcgtaagagcggcaacctcgacgacttctgccgtcgctggggcggtgactataaatacatggtcgtactcgacgccgacagcgtgatgagcggcgaatgcctgaccagcctggtgcgcctgatggaagccacgccggatgcggggattatccagaccgcgccgcgtgcgtcgggcatggacaccctgtatgcgcgcatgcagcagttcgctactcgtgtgtacggcccgctgttcaccgccggcctgcatttctggcagctgggtgaatcccactactggggtcacaacgcgatcatccgcatgaaaccgttcatcgagcattgcgccctggcgccgttgccgggcaagggcgcgttcgccggttccatcctgtcccacgacttcgttgaagccgcgctgatgcgccgtgccggctggggcgtgtggatcgcctacgacctgccgggcagctatgaagagctgccgccgaacctgctggatgaactcaagcgtgaccgtcgctggtgccacggtaacctgatgaacttccgcctgttcctggtcaaaggcatgcacccggtgcaccgtgcggtgttcctgacgggtgtgatgtcctacctgtcggcaccgttgtggttcctgttcctggtgctgtccacggccctgctggcggtgaacaccctgatggaaccgcagtacttcatggcaccccgccagttgtacccgctgtggccgcaatggcatccggacaaggcggtggcgctgttctccaccaccatcgtgctgctgttcctgccgaaactgctgagcatcatcctgatctgggccaagggcgccaaagagttcggtggcaagttcaaggtgaccttgtcgatgctgctggagatgctgttctccatgctgctggcgccggtgcggatgatcttccacacccgcttcgtcctcgccgcgttcctcggctgggccgcgacctggaactcaccgcagcgtgacgacgactccaccccgtggagcgaggccgtcaagcgccacggtccgcaaaccgtgctgggcttcctgtgggcgctgttggtggtgtggttgaacccgagcttcctgtggtggctggtgccgatcgtcggttcgttgatgctgtcgatcccggtgtcggtgatttccagccgtgtcgggctgggtctcaaatcccgcgacgagagcctgttcctgatccctgaggaatacaatccgccgcaagcgctgctgtctaccgacaagtacacccacgaaaaccgttggcacgcgctgaatgacggctttgtgcgttcggtggtcgacccgcagcagaacgctttggcttgcgccctggcaacctcgcgtcacgcccaggccgaaccgatcgagtacctgcgtaccgaacgtgtgcgccacgcgctgaaagtcggccctgccggcctcagcaacggcgaacgcctggccctgctcagtgacccggtcgccctggcgcgcctgcacgagcaggtctggagcgaaggtcatgccgagtggctcgccgcctggcgggactcgatcaaggcagatccgcatgcaccgttgctgccgctgcaaccgctgtcgtcccaggcccaaccggcctgattcaggcacccccgagggctcgcctcgggggtgttcgcagcgctggtcctacagcgtttcccgcgttttctctgttgtgccaacaccttgttatttcgaaacaaaagaccctcgcttgaggcgtattgccgtgcccgtggctgcgttagcatcgcccccgcatttgacttggcacggggggattcatgatcaaacggtatgttttggcgctgctcataggcgctgtcgctttcattcacatgggcctggcccaggccggcgcgattgatgacgccgttcggcgcggcgtgctgaaagtcggcaccacacccacttacgtgcccttcgaaatgaccgataaacaggggcgcatcgtcgggtttgaaatcgacctgctcaaggtcatgagccaagccctcggggtcgaacttgagttggtcgtggtgccctacaccgaactggtggcggggctcttggcgaagaagttcgacctgatcggcagcggcatgaccgtcacccaggaacgcaacctcaagctgaatttcagcgattcgttcatcgtcgttggccagtcggtgttgttgcacccaagccttgcgggcaaggtcaccagtgtcgaagacctcgatgatcccggctaccgaattgccgccaccgaaggcaccaccggcgagtcagcggctcgacgttttctgggggcagcgcgactcagcagttttgccacgccggaggaaggcgtacgccaggtggtgcagggcaaggctgacgcctttattcatgatgccccctacaacctgatcgccctgaaccgcccggaaaacagcaccctgttggcactggaacaacccttcaccttcgaacccctggcgttcggcttgaaaaaaggtgatttcgacagcctcaactggatcaaccatttcctcaatcaggtggcgcaggacgggacctatgatcgcttgcacgacaagtggtttaaagacaccgactggctggtggaaatcgactgaaagtcataactgcttacacatcaagccgttgcccgagctgcctgagcaagtgtctacccctgcggtttgctgcagcgttgtggggcttttccgacatacgccgacaacaaatagccgtgaaacctttgtgacggcaggcgagtgggttaggatcgcaccccgaaatggtgcagcccttttgcgcgccgaccttataagaatggttcaggggacttgatgatgaaaaagtatctttcgatgctgctgctcggcgtcaccgcgctggtcgcggccaatgcggcccaggccggtgcgatcgacgatgcagtcaagcgcggcacgctgaaggtcggcatggacccgacctacatgccgttcgaaatgacagacaaacgcggtgaaatcatcggtttcgaagtcgacatcctcaaggccatggccaagtccatgggcgtcaagctggagctggtctccaccggctacgacggcatcatcccggccttcctgaccggcaagttcgacatgatcggcagcggcatgaccctgacccaggaacgcaacctgcgcctgaacttcagcgaaccgttcatcgtggtcggccagaccctgctgattcgcaaggagctggaaggcaccatcaagtcctacaaagacctgaacgacgagaaataccgcctgacttccaagctgggcaccacgggtgaaatggtcgccaagaagctgatctccaaggccaagtaccacggctacgacaacgagcaggaaggcgtgctggacgtggtcaacggcaaggccgatgccttcgtgtatgacgcgccgtacaacgtggttgccgagaagaaagtcggcaacggcaagctggtgttcctggaagaacccttcaccttcgaacccctggcgtttggtttgaagaagggcgactacgacagcatcaacttcatcaacaacttcctgcaccagatccgcaacgacggcacctacgatcgcatccatgacaagtggttcaagagctccgagtggctcaaggacatggaataacgcttcagaccgagttgcctgtatcgcaggcaagccagctcccacatttgacggtgttcacacatcaacatgtgggagggggcttgcccgcgatggcggcctcacaggcaacacaaatcgcggaaagtgaaatgaaacagaaaaaagcccaatggccctggcacctgctgaccgtggtcgtgctggtcggcctggccggcgcgttgtactacgccacctcgttgatgtcctacgagtggcgctggaaccgcgtgccgcagtacttcgcttaccaggcggaaacatcccagcgtgccgctgacatctccaccgtggtcgagctggtacgcaaaggcgatgtggccgaagtcaccctgcgcaacgatgcaggcgccgagcaaaagctgaccgtggccgacaacagcctgcaagtggcgcgtggcgacgatgtggccgaaggcgacgtggtgggcgtgacccggcagtgggcgctgggcccgttgatgtggggcttgtggaccacgttgtggttgtcggtggtgtccggcatcctcggtttggcgatcgggctcgcgacgggtttgtgtcgcttgtccagcaacccgaccctgcgggatctgtcgacgatctacgtcgaactggtgcgtggtacaccactgttggtgcagatcttcattttctatttctttatcggcacggtgcttaacctgtcgcgggaatttgccgggatcgccgcgctttcgctgtttaccggtgcctacgtggcggaaatcgtccgcgccggtgtgcagtccatcacccgtggccagaacgaagctgcccgttccctgggcctgagtgccagccagtcgatgcgccacgtggtgttgccgcaggcgttcaagcgtgtgctgccgccgttggccgggcaatttatcagcctggtgaaggacacgtccctggtgtcggtgatcgcgattaccgagctgctcaagagcggtcgtgaagtcatcaccacctcgttctcaccgtttgaaatcctgttctgtgtcgcaggcctgtacctgctgatcaacctgccgctgtcgaaaatggccagccggcttgagcggaggctcgcgcaaagtgattgaagtccgcgatctggtaaaagtcttcgacacccgtggtcatgtggtccgtgcggtggaccacgtcaccacgcaggtggccaagggcgaagtgctggtggtcatcggcccgtccggctccggcaagtccaccttcctgcgttgccttaacggcctggaggaattcgactccggctcggtgagcatcgacggcctgcaactggctgacccgaagaccgatgtgaacgcctaccgccgcgaagtcggcatggtgttccagcacttcaacctgttcccccacatgactgtgctggagaacctgtgcctggcgcagaaagtcgtgcgcaagcgcggcaagcaggagcgtgaggccaaagccctggcgctgctggaaaaggttggcatcgcccagaaagccaacgagtttccgtcgcgcctgtctggcgggcagcagcaacgggttgcgattgcccgggccctggcgatggagcccaaggtgatgctgttcgatgaacccacctccgcgctggacccggaaatggtcggcgaagtgctggatgtgatgaagaccttggccctggaaggcatgaccatggtctgcgtcacccacgaaatgggctttgcccgtgaggtggccgatcgcgtgctgttcttcgaccatggcaagttgctcgaagatgccgccccggccgagttctttgatgcaccgaaagacccacgggcccaggcgttcctgcgccaggtcctgtaaggctcagagcctgaatttgccgaccagcgtctgcaaatccaggctcagtttggtcagttggacgctcgccgccgctgtttcctcgctggcggcggcggtctgttccgacacatcccgcaccttcaacacgctgcgattgatctcttcgaccactgcactttgctgttcggccgcggcggcaatctgcgggttcatttcctggatcaccgagaccgtgcgcgcaatcgccgccagggcgtcacctgcgtcgcgggtcagctcgacactgtcgtcggtcaggctgcggctgctgtccatgatgtcggcgacttgctgggtgccggtctgcaacccctggatcagtccttcgatttcttcggccgattcctgggtgcgctgtgcaaggctgcgtacttcatcggccaccaccgcaaagccttcgccggccgtgcccgcgcgtgcggcttcgatggcggcgttcagcgccagcaggttggtctgctgggacaccgatttgatcacatccagcacgctgccgatcttctggctttcttgctgtaacgccagcatcgcccggcccgcgagggccatctcatctgccagttggcttatctgctcaacggcctgggtcaccactttctccccggcgctggcttgcagatcggcttcgttcgccgcgaccgaggcttgctcggcgtgccgggcaacttcctgtgtggtggcgagcatttcgttcatggcggttgccacttgatcggtttcgtctttttggtggttgatgccggtgtgactgtgttcggtaacggccgacagctgtgtggcggcgctggcgacctggcgggcgctgtcgccgatgccgctgatcaggctgcgcaggttgcggttcatgtcactgatagttcgcagcaattgccccaactcatcgcggcgttccacttggatgtcatggctgagatcgccctgggagatgcggttggcagacaccagcacctggcgtagcggcacggcgatctggcgagcgatccaccaggctgcaagggcaccgagcagcagggcagccaccgtgacgctgatgagcagtgtccgggtgttgtcggcttccttgccgcgcttgagaatctggccattgctcaccgcttcgctttgttcaagcaactggttgagctgcgtttcaaaccgcccctgcgcagtttcggtggtgagctgagcgtccttgagcttgatcaactgcgcgcgatagttcgccaggtcggttttaagcaaggttgaatcgatcggcaggtctgtcacggccgcttgggcaatgtccagggcatcgagggcctggccgacggcttcggcataggcttgcagcgactcctccgcccaggcagggcttcgggcgcggtcctcggcttgctccatagcctggcgcaggttctcgatggcatcgagtgcctgctggtcctgctggtcaggcagttcgctggcgagttgtgcgagcgtgtcgctggcctggagtgctgtggcgtggaggggggagcgcaagttctcgcgcgcctggatcaacggcggcagctccaccagcgccgccttgaagctggccgacaggcgttccgcttcctggacgcgctgcaagtcggctgggtctttcagatgggttgacaggaagcggaggtgctcatcgatctgaacgacttgcctcttcattttgtccaggctggccgtgtccgccagggtccggtacacgatacggtccgcacgcatggcttcagcaacaaccgacagttggctcaaggcagtcagattgcctgagcggaacaacaccgcattcagggcttgccagccggccacggcgatggcgaagctgagcatgagcacctggccaaaccccagggcgagcttgaggcggacgctggcattgaccagccaacgggccagtagaggaagcatgatgaacctccaaatctgaaaaagcgtttcgcgacaaaagaaacgctaattcgattcggagtattgctgggctgataactgcgtaggaaatttcacaaggtgctgattagatgcggaagcgccccaccagtgtctgcaggtaaatgcccaggcgtgcgagctcggcactggaggcggcggtttcttcactggccgaagaggtttgttccgacacatcgcgcacgttcaatacgctgcggttgatctcctcagccaccgcactttgctgttctgcggcagtggcaatctgcgagttcatcgcctggatggtcgagaccgtgcgcgtgatgctcgccaacgcgctgccggcgcgacgggtcaactcgacgctgctgtcggtgaggccacggctgttgtccatgatggtcgcgacctgctgggtgccgctttgcaggccgacgatcagttcttcgatctcttcagtggacttctgcgtgcgctgggccaggctgcgcacctcatccgccaccacggcgaaacctcgtccggcttccccggcacgtgcggcctcaatcgcggcgttgagggccagcaggttggtttgttgcgctacggacttgatcacatcaagcacactgccgatcttgtcgctttcgcgcttcaggtcacccatggcgacggtggaattgcccacctcggtggccaggcgttcgatctgggcgatggcttcgcccaccaccttgtcaccctcgcgggcctgctgatcggcggccacggcggcctcagaggcttcctcggcgttacgcgccacttcctgcacggtagccgccatctcgttcatggcggtggcgacctggtcggtctcgaccttctggctgttgacgccggcgctggtttgttcggtcacggccgacagctgctcggcggcgctggcgatctgggtgacgccgtcgctgatcccgccgatcagctcacgcaagccgacggtcatgctttgcatggcgcgttgcaactggcccagttcatcctggcgcaaggaagtgaggttgtggctcaggtcgccggaggctacgcgttctgccacctgcagcgtctggttcagcggaatgatgatctggcgggtgatggcccaggcggccaccagaccgaagatcagcgccagcacggtcgccagcagcaacagttgtttggcccgcgcggcgtcggcgtcgcgtaccacggtttgcgaggtggtgagtttttcgctgtggttctgcagggtctcgccttgggcgctcatgattttcagcgcgtcggcggcggccgtctgggagtcacggtactggctgacggccgcgcggtaggcttgcagtgaagtgctggcctcctgcaggttggcctggtactccgcaggcaattggccctccagcgcggtgattttcttcacggcgttatcaatcgcgtcgagggccggctgctccgcctcgaccttggcactgtaggtgtagccgcgtacctggaagcgtgcctgctggatcagtttgctcaggtcgaccacgctgttgaactgcgtgacgctgtcaccttgcagcagggacttttccacctcattgaccttggccacggcgttgtcggcggtgtcgcccagcttgctgcgcgcgccttcacgcttgagcccggcctggaccatggcgccgaaggcttttttgtattggttcaaggcgtcctgttgttgttccaccagggccttgtcgtcgggttgctcgatcaggtcggcggcggtcttgaggccgctgtccagtttggcgatcaggccgttgaccgcgtccgtgccttgttcgccgcgacgcatttcgaagtccaggcgcgccaggcgcaagtccttggtcagtccgttgaggctggagatatagcccagcttgtcaccgcgactggtgacatcccccaagccggtccaaccggtgaaggtgatcatcaacgtgagcagcaataccaggccgaagcccacgccgagtttggttttgacgctgacattccccagcttttcggctaaccaacgatacatgctgcgaactcccctggaacaaggcttggacttatccagaggatatcggccagcacgcgcaattctgtagcgaagctgtacccatgtgggagggggcttgcccccgattgcagtggttcagcaatggataagctggatgacacaccgctatcgggggcaagccccctcccaccgggttgcttagggaagttagaagagtcgggcgagcagggcggtgacggcggtttcgacgcgcaggatgcgggcgcccagttgcaccggctgcaagccggccttggccagcaggtccacttcgtagggaatccagccaccttccgggccgatggccagggtcaccggctcatccagcccgcgggggcaggctggatagtcgccaggatgaccgaccaggcccagggtgccttcagtcatcgccggcaggcggtcctcgacgaacggcttgaagcgcttctcgataatgatctcgggcagtaccgtatcccgcgcctgttccaggccgaggatcagttgctcgcgaatcgcctcgggttccaggaacggcgtttgccagaagctcttttccacccggtaactgttgaccagcaccaccttgggcacgcccatggccgccacggtctgcagcacccggcgcagcatcttcgggcgcggcagggccagcagcagggtcagcggcagtttggccggcggcggttggtcgaagctcacatgcaactcggcttcactggcctccaggcgcaacagttgggcattgcccatcaagccacccatgcggccgacgcgcaggctgtcgcctacggcggcgcggtggacttcctgcatgtgcaccaggcgccgatcacgcaacactacgcggtcggccgcgatgaaatcggcctcctccagcagcagcaggttcacggctgggtcgctggcggctggtcgtcgtcgcgctggtcatccgggtgttcgccgcgcttgctgatcaggttgctgaacaggatgccgatctcgaacagcatccacatcggcacggccagcagggtctgggagaagatgtccggcggcgtgaggatcatgccgaccacgaagcagccgatgatcacgtacgggcggatcttcttcaggtacgccacgttgaccacgccgatccataccagcagcaccacggccaccgggatttcgaaggccacgccaaaggcgaagaacagcgtcatcacgaagtcgaggtagctggtgatgtcggtcatcatttccacaccggccggggtggcggcggcgaagaacttgaagatcagcgggaacaccaggaagtaggcgaacgccatgccggtgtagaacagcaggatgctcgacaccagcaacggcaccgcgatgcgtttctcgtgcttgtacaggcccggcgcgatgaagccccagatctggtgcaggattaccgggatcgccaggaacagcgaaaccatcatggtcagcttcagcggcgtgaggaacggcgacgacacgtcggtggcgatcatcgtcgcgccggccggcaggtactggcgcagcggcgtggagacgaaggtgtagatctgctgggtaaaggcgaacagcccggcaaagatgatgaagatggccgctacgcagcgcagcaggcgggtacgcagctcggtgaggtgcgagaccagcggcatatgctggtcgttttccggtttatcagcgctcatggggctcgcggcggcaatgtagggtcatggggcgcgggcgacgcggcaggcgtcggcgcaggctcggttggggcggtcggtgcgacgggggcggcttcaacggtcggcgcgatgctgttttcagccgcaggctccaccggtttggctggctcctgcacgggcgccagaatcttgcgggcttcctgctccaacgagaggatgtgctcgttgtgcagttgccggcggatctcgtcggcgccgatttcccgttcaacttcctgtttgatcgcattgaaactgcgtttcaggcgcccgatccacaggccggccgtgcgcgcggcaccgggcaggcgttccggccccagtaccagcagggccacgaggccgacgagcagcagttcagagaagctgataccaaacattagtcagtgctcacgagtctttgcgggtcggctcttcgactttctcagcctgtacgtcgaaggtacgacgctcagtgattggctgggtagcctgcgggtgcacaggctgcgccggaggcacggggttgacggcagggtcggccggcttttcgtcgtcgttcatggctttacggaagcccttgatcgactcgcccacatcggtgcccaggttcttgagtttcttggtgccgaataccagtaccacgaccaccagaatgacgatccagtgtttccagtcaaaaatgcccatgctgcgtatcctctagtcttggttattcaggcggacgggcgcgaggccttctcggcgtgcccggacaagccgaagcgacggtccagttcatccagcacagcctgtgggtgctgccccagttgggcgagcatgaccaggctatggaaccacaggtcggcggtctcgtagatgacatcgctgtaatcgccgctgagctgcgcgtccttggcggcgatgatggtctcgatggactcttcgccgagtttttccagaatcttgttcaggcccttgtggtacaggctggcgacataggagctgtcggcgtccgcgcctttgcggtcttccagcacctgggccacgcggttcagggtatcgctcatgtctagtgtcctgccgagtagatggcgtgcgggtctttgagcaccggctccacgactttccattcgccgttctcgaacacgcgatagaagcagctgtgacggccggtgtggcaggctatgtcgccgatctgctcgaccatcaggatcaccacgtcggcgtcgcagtcgatgcgcatctcgtgcagggtctgcacgtgcccggactcttcgcccttgcgccacagtttgccacgcgagcgtgaccagtagatggcgcgctgctcagtggcggtgaggctcagggcctcgcggttcatccaggccatcatcagcacgcgcccggtcttgtagtcctgggcaatggccggcaccaggccgtcactgtcccacttgatctcgtccagccagtctttcatgttcggctccggcaatttgcgacagtgtataaccggattggctatcgacgcacgatcagataaacacccacggcgaccatgatgccggccggccagtggcccagttggttcagcgggccaccgatggccagcatcacgccgccgaccaggtgtgcggcgcccagcaggcgcaggaaccagtcatccttgcgcttgtgccacggcggcgccgggtccttggcatggggctgggacatgcgctccaacaggtcgcgggtcatgttggccaggtgcggcagttgttccatctggctgtgcaggttgcccagcacggttttcgggctcatccgctcgcgcatccagcgttcgaggaacggttgcgcggtgttccacaggtcgaggtccgggtacagctggcggcccaggccttcgatgttcagcagggttttttgcagcagtaccagctgcggctgcacttccatattgaagcgccgcgcggtctggaacaggcgcatcagcacctggccgaaggaaatatcttttaacggtttttcgaagatcggttcgcacaccgtacggatcgccgcttcgaattcgttgagcttggtttccgctggcacccaacctgagtcgatatgcagttgcgccacgcggcggtagtcgcgcttgaagaaggcgaacaggttgcgcgccaggtaatcctggtcttccggggtcaggctgccgacgatgccgcagtcgatcgcaatgtactgcgggctccacgggttgacggtgctgacgaagatgttgccggggtgcatgtcggcgtggaagaaactgtcgcggaacacctgggtgaagaagatctccacgccacgctcggcgagcatcttcatgtcggtgcgctggtcggccagggtggcgaggtcggtgacctgcacgccgtagatgcgctccatcaccagcactttggggcggcaccagtcccaatacacttgcggcacgtacagcagcggcgagccttcgaagttgcgcttgagctggctggcgttggccgcctcgcgcagcaggtcgagttcgtcgtagatggttttttcgtagtcggcgaccacatccaccgggtgcagcaggcgtgcatcggcgctgaagcgttcggcagcgcgggcgaggatgaacagccacgccaggtcttggccgatgatcggcttgaggcctgggcgtatcactttcaccaccacttcttcgccggtcttgagctgcgccgcgtgcacctgagcgaccgaggccgaggccagcgggtcgacgtcgaagcggctgaacacgtcgctgatcttcttgcccagttgctcttcgatgagcttcatcgattgctgagagtcgaacggcggcacgcggtcctgcaacagcatcagctcgtcggcgatgtcttcgggcagcaggtcgcggcgcgtcgagaggatctgcccgaacttgatgaagatcggccccaggtcctgcaaggccaggcgcaggcgcgcgcctctgctgagttccagctgtttgcgtgggaaccagcgccacggcagcacatagcgcacggcgagcaggaaccacggcaggggcagggcgaacagcaggtcatcgaggcggtagcggattacgacgcgctggatacgaaacaaacggcggacggcgagcagcttcatgcgttatcgcttggatcaagggaacggctcaggcgctcgaagcgcgcctcaaggcgttccaggtcgattttggccttgtcgagttcacgaaagcgcgcttgcgcttcccgctccccgaccagggtgcgcgattcttcgctcaggtattcggcgaggttctggttgaggctggcgaacccttgctggtaccagcgcgaacggctgcgcaggtgcccgctgatcaactgggtggcgacggggccgatccagcgcgacagttcgtattcccagtccagttccaggtcctgcagcacggcggcgaggtccatcagcaccgaactgtcgccttccaactccacttcggcgctgtgcaggatggcggtcttgttgcggctcagggccaggtgcaacaggctcgatgccggcgcacgcagggtgcagtcggattcggcggcccattgggtcgcgagcatcaggccttcttcgctgggcaggataaacagctgcaaggtggggctgcggcaatcgacggcaatcactttgccgttgaggtgcgcaagccgcgccagggcggtgctgtccaggcgcagtacacggttgaggccgtgttctgcgctggcgagaagacctttgatcagcatcagggcttgataccgcggtgcagggcgacgatgcccgacgtcatgttgtggtaggtcacgcggtcgaaaccggcctctaccatcatcgacttcagggtttcctggtcggggtgcatgcggatcgattcggccaggtagcgatagctctcggcgtcattggtgatcagcttgcccatcaacggcatgaaggcaaacgagtaggtgtcgtagaccttggacatcagcgcgttggtcggcttggagaactccagcaccaacaggcggccacccggcttgagcacgcgcagcatggagcggatcgcgtcttccttgtgggtgacgttacgcaggccaaaggcgatggtcacgcaatcgaaatggttgtccgggaacggcagcttctcggcatccgcctggacgaactcgatattgccggccacgcctttgtccagcaggcgatcacgaccgaccttgagcatcgaaccattgatgtcggccagcacgacctggccggttgggccaacgagcttggagaacttggctgccaaatcgcctgtgccgccggcgatgtccagcacgcggttgccggtgcgcacgcccgacaactcgatggtgaagcgcttccacaggcggtgcatgccgcctgacagcacgtcgttcatcaggtcgtacttggccgcgacggagtggaacacctcggcgactttttccgccttttggctttccgggacgttcttgaagccgaagtgagtggtgggttcggcatcgctgcctttgcgctgatcagtcatatcgctgtcaccaaaagagaatgcgggacatgataatccccaaggcctgctttgtcttggcaaggctgaaggtaagatgggcggtcagcgagaccttttgccgcatcgaaggtatccaagtccctataaagaggagtcattgcaatggcccgtataactgttgagcgtgcacattccctgggtaaagagggcgcgcgggcaaaggccgacaagttggcgcacaaactcaaggagcaatacggcctggagccgtcgtggtccggcgataccttgaacctcaagcgttcgggggttaaaggcacagtggtagtggccgaagattcgctgcgtattgatgtggagctgggtctgttgatgtcagccatgagtggcaccatcaagtctgaaatcgaaaaggcgttggacaaggcgttggcgtgatcccattgttcttagggtgccgattctaattttcccgcctactttgtgcccaagccctcaactcctgtgggccgttcctcccccctattctgcgtgaggtgcaccatggccaaagttatcctgaagaaaaaaatcgacgcccagaccaccaccctgagcgaggttaagtcctacgcccgcaagatttggttggccggtctgggtgcttacgccaaagtcggaagcgagggcggcgagtacttcaaagagctggttaaaaccggtcaacatgttgaaagcaaaggcaaaaaagttgcagttgaacaacttgaagccgccaacagtcagattgaccaagtaaagagtaatgtctccacggtcaaaggtctggtagaagttcagctggataaagttgaaaaagcttttgatactcgcgttgccagtgccttgaatcgaatcggcattgcgtctaaacatgacgttgagacactctctgctaagctcgaagagctgacgacattgctagaacgtgtcgcgcgtaaacactaaggagacatcgggatggctgttaaaaagactactcagaaagaaggcagctcgtgggtcggggaagttgaaaaatattcccgtaagatctggcttgctggtttaggcgtgtactcgaaggttagcactgacggcggtaaatacttcgagactttggtcaaggacggcgagaaagccgagaagttgaccaaaaccacggttggaaaaaaagttgaagcggccaaggcaactgccggctccgccaaatccagcattgctgacacttgggagaagttggaacagactttcgacaagcgtctcgccagtgctgtttcgcgactgggcgtgccgagcaaggctgaactgaaaacgctgcacagcaaggtcgataccctgaccaagcaaattgaaaaactcaccggcgctaaagtggctcccgtgaaagcggccgctgcaaaaccggctgccaagccggcggctaaaactgctgcggccaaacccgctgcgaaacctgcggccaagcctctggtaaaagccgccgccaagcctgcggctaaagctgctgccaagccagccgccaagaccgcagccgcaaaaccggccgctaaaccagtggccgccaaggctgctgccaagccggccgctaaacctgctgcaaaaccagcggccaaagccgcggcaaaaccggctgccaaaccagccgctaaaaccgcagccgccaagcctgctgccaagccggcagccgcgaaaccagccgccaagccagcagttgcaaaacctgcggcgaaacccgctgccaagcctgcggcaaaacccgccgccgccaagaagccagcggccgcgaagaaacccgccgccgccaagcctgcaacagcgccagtcgcttcgacagccaactcggtgtccgcgccaacgccagcacctgctaccccgactgcaacgccggcaacaccgacgccatccagtcagtcctgattttccggggcacacaaaaatgcccggcctgcgaaggtcgggcatttttttgcctgagtctcagagcgtcagttgtaggtgatcgacacggtcacgttggtgaccagcgtcccttgagtgacatccgcagcggtgtggctgacagcgtagtagcccgacagtggcagcacggctttccggttgctggttggcaccgtacgggtacgttgggcgggggttccgttggccgggatggtcaccgcggaaggcgtgcgatgcaccagccataagcccgtgcccttggatgtgcctgtgttggcaaacaacccggcgtttccacccgaaggggtgcctgtgaacaggaagtgcacgttgcggatatcggactcacagtcggcggtaacgtcaaactgccgttcgccggtgtaggtgatgttgtcaaagtctgaaatcttgatggtcggcaatacgatgctgcggctcacatcgccagccgccaggttgcacgtaccggcattgacctggccggtgaatctcagtgttccggtggtcgcggcctgcaccgcatgagtggccaggcttgcagtgattgccagcaggagaggcagggtttggatcttcatcaggtggtcctttgggggtcagttgtaggtgatgttgacggtggtggtgctggcgagcgtgccttggcgaaccgtgccgtttttgtagtaggccgcgcccagcggcaagaccgcacgattgcccgagacggcgaccgtgcgtgtggcgttgttgctgatggtctggttggccccactggtgcgcgagtacagccacagggcgataccgccagcagtgccggtattgctgaagagcgaggtgttcccgggggcgggagttccggtaaagcggaaggtgacgctggatgcattgctgcaagtggccgacagctcgaagttgctcgcacctgcgctgttagcgttgttgaacgcgctcacccgcacggtaggcagtgggatggtgcggttgacgtcgcctgtcgccaggtcgcaggtggcggccggcctgacgaaacgtacggcgctgcccagttgcaagcggaacgtgtttgaggatttaagccatttctgttcgaagaaggaacctgggggcactgtcccgctggtgacgggaccgatcttgtagaaggtcgcttctgccgaggtgaagcttgagaccggtccggtaatattgacccggggggtgttatgaagcgtaaaaattgcgttgagtccgctatttgttgtcatcctgacggccacgccaacgcctggaacttcggttgggtgcaggccctggttatgattattggggtagcgcccgttgatccactgggttgccagtacgcagaacgtgttccagccgggagccgcaccgttgaatgcctggcgaatgatcacaccgttgacgggcaggctgtcaggtacagggatagtcgccggcagattgagggttagtgtgtcgttctgatacttggggcaacttgcttgggcggcgattggcatcccgatccccagcattagcgaaacaagttttattgttggtttcattttcctcggtttccccatgacagagaggcccgctctactcggaggcggtggcggcctgcctgcgtgctcagttgtaagtgatgttgacggtggtggtagtggcgagcgtgccttggcgaaccgtgccgtttttgtgataggccgcgcccagcggcaagactgcacgattgccggagacggcgaccgtacgcgtaccgttgttactgatggtctggttcgcgccactggtgcgcgagtacagccacagggccacaccgccggcggtgccggtgttgctgaagagcgaggcgttcccgggggcaggagcgcccgtaaagcggaacgtgacgctggacgcgttgctgcacgtggccgtcagctcgaaattgctcgcgcctgcgctatcggcattgtcgaacgcgctcactcgcacggtcggcaaagggatagtgcggttgacgtcgcctgcagccaggtcgcaggtggaggccgggttcacaaagcggatggagttgttcagcaccatccggtaatggcccttgccgccatcccaattgttgtgctggatctcgccgctgggcagggtgccggtggtgaccgggcccaacttgtagaactccgccaccaaccttgtcgccccccagaggattcgcccaggcgccgatacgaggctttccgtcttgagtttcgcggagtagggcgcaccggaagtcagcgtgaccatgacgcgcatgccgataccgggaacgttggtgtgataaatcagcccgcccggcgccgattgggctgacgtaaatcgcccggtgagaaacgtcggtgtcgcggtggggcaccacatatagaacgtcggatacggccctgcgaacgtctggctggtgatcagttggcctacgccaaggttttccgggacggagatggtgttggggaaggtcacgctgtgttgcatgttggggtaccgatcacacgccgcgtgggcggcaatcggcatgcccagggccagcagtatcgaaatgaatgtgatggagtgtttcatcttcagtcccgtcatgagaaagggtgtttaagggcgaggagcgacgcgcccctcaccctcgatcaaccgcctgtaccggcccggcaggtgccagcgtccagttggcgcaggcgcttgccaccctcggccccaggctccttgtccaggcggtagttcagttggcaggtggcattggcattagggccccacctgacgttcaacgccccttgatcatgtgcaacccgcacaaaggctttgccgccctggccgaccacgccgacgctggcgccgctttcatcaaacacatccgaaccgaacggcagcaggctgccatcctcacgccgtgcggtaatcaggatcgcctggccgctgacggtctcgaactgcagcttcaccaccgaacctgcacgaggcgcgacgttttgtgcggccgtcttgagctcgacatcgacggacaggtccttggggtccagttcgacgacgttctggcggtatggcgtgaggtggggcaccacggcgtaaccgctcgtaccgacctgggcgctgtggttgccgttgatgcgtgcgccctgtgcatcgggggcctggaccaggccaatggtgtcgcccagttccggggcgaaggtcacgccgcctgcgtgggcgaccacaccgccggtcatgccgagggacgctgtacggtaggtgttgctttgcccataactggcggacagcacgccctgactggcttggtacttgatgtcggcactggcggaactgccaccgccctgggtatggctgccacccacgccgtaggtgaattcgttgcggtcgcccaggctgccaccgaggttggcgcgctcgccgctgcttcgattgccgcgatacgccgtggtggtcagggttggcgagcgagggctgctgcccagcgggaagctcaggctcagctcgatttgcttgtcgacgcggtcactcagcaagtctttggtgcgctgggcgctgagggtgtagtgcaggccgttccagctgccggtgtagcccgtggtgaaggtcaggttgccgcttctgcggttccagtagttctgtgaggaaccggtcaggtacaccgagccgttgcccaggctctggttgaggctgatgtccatccggtcgcgcaggcgtgaaacgttgtccaggctacgatcgtcgatggcaaggtcgcgcacccgtgcggcgtcggccacgctcaggaagccctccgtggagtaacggtaggcgccgagggcaaagtgggtgccggtgtcggtaaagttcttgctatagcgcaactgcacgcttcgcccgccacgggagtcgtggcccggaagcttcgcggaggagttggtcaggtcaagcgacagcgcgccgaaaggcgtgttgaaagccgcccccagcaactgcgattgatagtcttcgcccatcaccacgccggtgtagccggtcagcaggttgctgaggccgtgctggtaagtggcttgcatcaaggtcggcgggtagcgcagcccgatttcatccagcttgccgacactcaacgagtagcggctgtagccggcgcgcaacaggttggcgttggcggcaaagggcacaatgaactcacgcttgcggccatcggcctcggtaatcgtgacggtcaggtcaccgccatagcccgtggcaaacaggtcgttgagcacaaacgggccgggagccacggacacttcatcgagcagcacaccgcgctggcgcacggtgacccgcgcgttggtttcggcgatgccacgtacgaccggtgcgaagccagtcatagagtcaggcagcatccggtcgtcactgaacaggctggcgccccgtaagcgtacgctgtcaaacagctcgcccgaggtaaagatctcacccgccaccaattgagagcgcagcggggccagttcgcgctgcacgtaggtgctgctgctttgatagccggcactgctatcgttgcggctgaaactgccgttgtgtcgccagtgccattcacccaggttgaggccggtgttcaagcccaggtagtgggaatcgatggtgcggccattggtctgtgtcgcgaaggagttgacgttgtagcgcacaaaggcggcatcgatgccgctgtcccagtgcttggggtcgacataaccccttgcctggcgcagcagatagatctgcggcacctgcagttccaggcggttctcgcccgagtcgaactggctgctgctgccgggcaggtaggtggcgatgtcatcgcaacgggaaaactccggcgccgacggctggccggcttcggcgggttgattcttcggcgcgtccaggtcgatgccaaagcggacaagcgcgtcgcgctcaaggcacatctgcgcggagtcctggccttcaacggcgacgaagaccagggtttcacgcccgatccactggccgttgaggtagacatcggtgcggtaagtaccgggcagcacgatgttgccgcggctgaattttgaaatatcgacctgctggtcgaccgcccgatccggaaagaaggcggggttgaactcgacattctcggcaccgtaggcggccatggcattggcgctactgagcagcaacaggcagcgcgccatgagcatcgattgacgacgtgacagggatccggcgcttacgctggcaggcgtgttggaactcatgtttaccattctcaaaaataaggactgtccgaattcgggcaaagggaacccctgcccaaaaaaagaggcatcaaccgaatgtgtgtaacgaagtggatagcgttgccagcggctggacggatgtcgccgctggcgtattcaggccgtcatttggcgagcttggcgcggtgggggatggttaccccaaagtcgtcgagcgtctggaactccacggtttgcgaggggctcggcggtgacttgaggctgggcagctcaaagcggttgcgtcctcccggcaccaccatgttgtccgtgccggacgccactgccttgcgggcatggcgttgctgtgcctccagcacatcgacctggtcgaacgtcacgtgatacggggtggggttatagacttcgaggacctggccctgctcggtggattcgcgccgccactgcagtttgcctggcgcctcctccacgctataaggcaaattcggcggacggaaaaacagcttgatccgcgagcgaaaagccagctgcaactgattattctgcggggaaccttgcgcctgggaaggcacctccagcacgttgaaccagaacaggctttcctgtttcgacggcagggcttcccccgtatacgccaggcgcacgacctgctgtttgccgggctccatgcggaagatcggcggtgtggtcacgaagggtacgcccgccagatccggcgtcgagtactcgtcgccattgtccagccaggcctggatcagcaccggcgcctgattcttgctttcaagccgaaccgtgacttctttgtcgttctgcgggtagacaatgcgggtgttgccgatgacaacactcgcgtgtgcgacggcagtgccgaacagcgcgaaggcgactgcgatgaacctgggcaggtgtgtgagagacattacgttcatggcggtgctcatctcacggctgaagggctaaggctcgccgagtggcgaacgcgggcgccgaagtcgctgacgctggtgaattcgactttgggcgtgccgctggggcgatcgcgcaactgcggcagcgcaaacagtttcacatcgccggacggcatcaacagaccgtcattggggtcttggttcgcggctttgctgaaccgtttgccttggctcagcaggtcaaccgatgtcagcgaaatatggtaaggcgtcgggttggtcgcttgcagtgcgtagccgttattgtgaggtaccagctgccattgcagtttcgaaggggcgctggccaccgggtagggcaacgattgagggcgcaggaacacacgcaagcgggtccgaaacgccaactcgatctgattgttctgctcggcgcccgctgtcaccggtggcacctccaacacgttcagccagtacaggctttcccggtcggtgggggcgggctcgccggagtagcgcaagcgcaatgcctgctgttgatgaggctcaatgcgaaagatcggtggtgacaacgtaaacggtgtttgcgccgtcgcgggtgttgagcggatgtcacccgtatccagccaggcttgcaccagtgcgggtcggtcccctctattctccagccgcacgacgacctcttgatgttcggccgggaagatcacgcgggtcccatagataatcacccctgcatgggccggcatcgctttgagcgacagcaacccaacggcacaggtggcaagcgcaaggcgagccatttttttcatagtgtcgcaactcttcgaatcggggggatggacctgcctgactgcggcaggcccgtttcatgcgaggcctgctggcgcaggcccattggtcccttaatcggcgtacacgaccatgaagccaacgcgagtcttgaccgtgccctctgtggcgggagcggtggcgtacatttgcgcggccagtggaatcactgcctggttgtcggcgatcaccacgccttccgatttctcggtgtacacgtggattggcgtgccatcgcggttggtcacttcaacctggacgttcttggcgttggcggtgtcgtccgggtcatcgtagccatcgatgttcaagcggccggtcgccacgtcaatggcggggctggtagggtcgaacgcaaccatggcggtgcgaccgttggtgcaactgccttcacctggcgcaccaatgcgaatggtgaaaccggtcaggttggcgcgatcacccggcctggccaggcgtgctgccgaaacgccacccaggttgacgtccttgaccactgccccggtgcccggtgccgaaccttcaaccgtgcaggtcacatcgttcactaatccagtgaaattgatggtgccgtcattggcagcgtgtgcggtttgcgatgcagcagcggccagggcaatagcggccgcgagggtagagagcgtgttgaatttcatagtattcccacttcgtgaattatctttttgatccgccacaggcagcgatcgctgcaccgggttttatccaagtggcggagcacataatgtgtcgtggaaagagtatgttgcctatagagaagtctctagatttgcctcgtgattattcgaaaatctcctggctgattcaaagtagttgtatttactttttttgtaagagtgggatgtaagacgcagctgaaagaaaaggacttattattgttgcgtgttgatacctgcgtgtagctgggatataccgtgctcgaactaaagagagaatgttcgtaatgagcggtaatcacttgagcgggtttcttgatgcctacttccacatccaatatacacaccatcatgttgcttgatgatcatgagatggttcgacaggggatcgagctggggttgggcaatgaggcagaccttgcggtgatcggctctttcggcacgggcaaggagttgctggaggctttggcgctgaggccggcggatgtggtggtgatggacttcatcctcggcccttccgacctggacggccttggcttgatccagacgttgagccgacgcttcaggcaatgcaggccgattgtcgtatcctcgcactacaccccggcgaccgtttcattggcgttgaaggcgggcagttggggagtcttgggcaagacccagaaactgacggagttaatcacggctatccgaacggtcgcccaaggccgtatctacttgcagccttgtatgctgtcggccatccagggcatgcagcctgtttctgagatgggcaacatgaaatcgaaaatggacccatcaagttcattacggctgaacaccagcctcacacccaaggagcaagaagtattgcgctgtttcctcgatgggatgtcagtgagttcaattgcggcaaagttttcgcgcagcgcgagtacgatcagcacgcagaagcaatcagcctatcggaagttgggtatcaagaccgacagtgaacttttcaagtttactcagcagtttgacgtacttgaatagtgaaaaggctgtaagaaagttttcttgcgctcgaaagttaattcgcgttgtccaggtaacttagcgctaattgttcaatagcctgtcgcgccggcgacaacaagtgcggcgcgaccagcatcatgacctggtagaccgccactcgcacttcgccctcccggtcgagaatgcgctggtaatccagggagaacagcaaggtcatggtgatctgttccaccaattgccccagtgcctgggtgtcgctggccaactggccggcggccttcaatcgcgcgagcagggacgccagggtgcgctttagcgccgtgagcaggttgcggatgcccttggccaatttcggcaggcgtcccgccaggtttgacaggtcctggaacaggaaccggtaatgcgccatgcgctcgacgatcaggtgcaggaacagccagtaatcctgtggttccagttgcgcgtctgccggtgggtcgagcaagggcgtcagttcattctggaagcgctcgaacagcccgagcaccaagggctccttgccatggaaatggtagtagaggttgccggggctgatccccatttcattggccacctccatggtcgacacgttgggttcgcccttctggttgaacaattgcagggcacattcaaggatacggtcgcgggtcttcatccagtcttcttaatgtgatcgttgagctcagcgtacgcgcacgtaagtgcccggtgccgcttccatcggtgggtaattctggttgcccagggcggtgagggtttcgcgttgcacgccggaacgctgctggatccactccagccaccgcggccaccagctgccttcgacatggtcggcgtcgtagtaccaggcacgtgggtcgctgctcagcttgaggttctcgacgtagttggccttggggttgcccggcgggttgagaatgctctggatatgcccgctgttggacagcacgaagcgccgctcaccgcccagcaattgggtggagcggtacaccgcatcccacggcgtgatgtggtcgttgatgccggccacgctgaaactgtccactgtgaccttctgcaaatcgatgggcgtgccacagacttccaggccgccgggatggctcagcgggttgtgcttgaagaagtccagcaggtcgccatgcagggcggcgggcaggcgcgtgttgtcattgttccagtacaggatgtcgaaggccggcggttccttgcccagcaggtaattgttgatccagtagttccagatcaggtcattggggcgcatccaggcgaacaccttggccatgtcacggccgtcgagcacgccttgctggtaggagcggcgcttggcggcttccagggtctgctcgtcggcgaacagggtggcggggctgtcgatctggctgtccagcaggctcaccaagtagctcgcgctggagatgcggcgcagctggcgcttggcttgcaggtggccttgcagcgcggcgatggtcaggccgccggcgcaggcgcccatcaggttgacctcgcgggcgccagtgatcgcgcggcagacgttaagcgcttcctccagcgcggcgacataggtggagaggccccattcgcgatgccgcacatccgggttgcgccagctgaccatgaaggtctgcaggccgtttttcagggcgtactgcacaaagctgttggccgggctcaggtcgaagatgtagtacttgttgatctgcggcggcaccaccagcagcggcttggcatactgtttttcgctcatgggcttgtactggatcagctccagcagctcattgcgaaacaccactgagcctggggtggtggcgaccgtcttgcccacttcgaaggcgtgcttgctgacttggcgcggcaggccattgttgtgcagcaggtcctcgaacaggttgctcaccccgcgcaccacgctgttgccgccggagttgagcagctccttgatcgccaacgggttgagcaaggtgttggacggcgagaccgcatcgttgagcaacgagaaggcaaagtgcgcacgggctcggtcatcggcgctgagggtgctgtcatcgatccagtggcgtgtctgcttctgccagctcaaataggcctgcaggctgcgccggtacaggggatttagcttccaggtggggtcgttgaagcggctgtcgttggggttgggttcgtgcacggtttcaccgagcagcacgcgccccagttgcccgctcagcgcccaggcatgccgaacggtatgcaccgggttgcgcaagccatgggcagccacgctgcgcagcgtcgacagcaaatcccggccgcgcaggccggtgatcgcattttgcgcgttgatgaacgcggcgggtgtgggcgccgggttcgtcacgggtctttctcgcatgagccaacactccttcgtcaagccatcaaacgggcacgccaattcagaaccatagtcggttcctggcaagttgcgcggcagtgtggtccttacacggccggtcgcggatgaatcaccgcgcgcatgcgctcctcttcaagaaacttcatgatgatcggcgccacggcttcggcccgggtgatcaggaacaggtggccgtcatcgatgatgtgcaactgtgcattgggaatgcgccaggcgagcatgcgcatgttgatcagcgggatcagcgggtcatcgtcccccgccagcaccagggtgggctggcggatcttgtgcagccagtggatgctggtccagcccagcccggcgaacagttgccagtagtagccgagcttgccggccgaacgcactttgctggcgtgttcggcggccagtttcgaatcgcggcggaacgaaccgccgtagatcatcggcgcgatgcgcaccacgtgggacggctggatgtagcggcgcgggctggccatcagccacagtaccttcggcttgcccggcaccatcaccgcacccgccgccgtggctgcgaggatcaacttcttgcaccgctccgggtagtcataggcaaactgctgcgccagcgcgccgccccaggacacgcccaccgcattcacctggccatagtccaggtaatcgagcatacgcgcggtgagtttggccaaaccgggaaagcggtacggccgattgggcgtcgacgaaccgccgacgccgggcacgtcgaaggcgatcacttccaggtccgggtccagtgcctggatgaacggaaacaccagctcaaggttggcgccgatgccattgaagatcagcaacggcgtcaagtgaggcttgccggggcgtaccgccgtgcggatggtctggccatccaggtcgatggtacggaagatgaacggttgcggcatgctcaaaccctgtgaagtgttacagccggaatgcggtcaatgtgggagggggcttgcccccgatagcggtgtgtcagttacagttgtatcaacggacagtcagccatcgggggcaagccccctcccacatttgaatgcatttcaatttagcgttcgtgtacgtaggtgcctggcgccgcctctgctgcggcataggttttattccccaaactcgtcggcgctttcttcaacttacccgctcgctccgcctgccacgcctgccaatgcagccaccacgaatccgtatgcttggtcgcattctcctgccactcaagcggcttgcccgccaggccatcgctggtctggtagcgcgccttggggttgcccggcgggttgaggatgctctggatatgcccgctgctggacagcacgaactcgaccttgccaccaaacagctgcgccgacttgtagcaggattgccacggcgtgatgtggtcgttggtgccggccagtgaatagatatcggcggtgacctgcttgaggtcgatgggcgtgccgcacacttccagggcgttggcgcgtaccaatgggttgtttttgaacagctcgatcaggtcgccatggaacgctgccggcaagcgcgtggtgtcattgttccagaacaggatgtcgaacaccggcggctcgttgcccagcaggtagttgttcacccagtagttccagatcaggtcgttggggcgcatccaggcgaaaaccttggccatatcgcggccttcgagcacgccggcctggtaggaatggcgcttggccgcctccagggtctgctcgtcgacgaacagcgccacctgggtgtccagcgtggtgtccagcacgctcaccagcagggtcagggcgttgaccttcttctcccccagcgccgcgtaatggcccaagagggcggtgcaggtgatgccgccggagcaggcgccgagcatattcacgtctttgctgccggtgatcgcggtgaccacatcgacggcttctttcagcgcttcgatataggtcgacaggccccattcgcgctgggccttggtcgggttgcgccagctgacaatgaacgtctgctggccattgcgcaggcaaaagcgcgccaggctcttctccgggctcaggtcgaatacatagaatttgttgatctgcggcggcaccaccagcagcgggcgttcgtgcacctgttcggtgatcggcttgtactggatcaactccagcacgtcattgcgaaacaccaccgcgccttcggtggtgcccagggtcttgcctacttcaaaggcacccatgttgacctggctgggcatgccgccgttgtgcaccatgtccttggccaggtgggacaggccgtcgagcaggctcttgccgccggtttcaaagaaacgcttgaccgccgccgggttggccgcgctgttggtaggcgccatggcttcggtcatcaggttgatcacgaagtggccgcggctgatgtcctgttccgacaggttgctgtcgccgatccagtcgtgcagttccttgcgccacgccaggtaggtttgcaggtagcgcttgtagagcgggttctggctccaggccgggtcggtgaaacgacggtcatcgctttccggcaccagcgcggatttgccaaacatcacattcttcagttcgacgccaaaatgggcgacgtgcttgacgctgtgcaacggttgcttgatggcttgggtcagcaccatcttcgccgaagcgagtaaatcctttttacgtaacgcgatgatcgggttgagccccagagtgttttccgaggcctggcgtttcaagtcatcgttgttcttgttactcatctacgacgctccattgtccgaaagacgagtaccggggaccgctgcgcacccagtttcgatacacaacacaagcctggtactgcgactcgggtgaccgttgataccacatcgtcaaatgcagggaacttgccagttccattggttacccgagtttaatttttttcgcaagcgggccaatcgttggccacgcgacagggcattcaagcagatgaaattagaaaatgcgctctaaagagcaagacgcctgagctagagcatcagccgtacgaccgactcgctcgggtcgcgggttttgccggcggctttgagttcggcaagatagtcggcccacagtgcgtcctgacgcacggccaactggtagaggtagtcccaggtgaacagtccgctgtcatgcccatcgtcgaaggtcagtttcagtgcgtactggccggccggttcgatcttgaccaacttcacgtggagcttgccgaattgcaggatcggcttaccgtggccctggacctcggcggaaggcgagtgggtgcgcagcagttcggcaggaagctggtacacctcgtcgggcccgtaagtgaggctgagggtgttggaggttttgtgcaggtttactgcagtaggaaatttggtcattgatgatcatcctgaacgaaccgacatcaaaatgtgggagggggcttgcccccgatagcagtgtgtcagtcagcccatctggtactgatacaccgctatcgggggcaagccccctcccacaataaagcaaagcagttctgagtgaggcttacagaatgtagcgcgacaagtcttcgttctgcgccaattcgcccaagtggctgttgacgtattcagcgtcaatcttgatcacgtcgccattctgcgcaccggccaggtcgccagcactgaaggatacttcctccagcaagcgctccagcaaggtgtgcaggcgacgggcaccgatattctcggtcttctcgttgacttgccacgcgatctccgccaggcgcttgatgccgtctggctggaactcgatgcccagaccttcggttttcagcagttcacggtactgctcggtgagggacgcgtgcggttcgctgaggatacgttcgaagtcgcccggggtcagcgccttgagctccacgcgaatcggcaggcggccttgcagctccggcaccaggtcgcttggcttgctcaggtggaacgcaccggaggcgataaacaggatgtggtcggtcttgaccatgcccagcttggtgttcacggtgcaaccttcgatcagcggcagcaggtcgcgctgtacgccttcacgggacacatcgacgccgccggagttaccgcgcttggccaccttgtcgatctcgtcgataaacacgatgccgtgctgctcgaccgcctccagggccttggccttgagttcttcctcattcaccaggcgcccggcttcttcgtcgcgcaccagtttcagcgcttccttcaccttgagcttgcggcttttcttctttcccttgcccatgttggcgaacaggttctgcaattggctggtcatttcttccatgccaggcggagctgagatgtcgacgccggacacttcagcgacttcgatctcgatttccttgtcgtccaactggccttcacgcaggcgcttgcggaacagctggcgggtgttggaatccgaagccggtgcggcgtcttcgttgaagcccatgcgtgccggtggcagcaaggcgtcgaggatacgttcttcagcggcgtcttcggcgcgatggctgaccttggtcatttcctgttcgcgcagcatcttcaaggcagcgtcagccaggtcacggatgatcgactcgacgtcacggcccacatagcccacttcggtgaacttggtagcttcgaccttgatgaacggcgcgttggccagcttggccaggcggcgggcgatctcggttttaccgacgcctgtagggccgatcatcaggatgttcttcggcgtcacttcaacgcgcaattcttcgggcagttgcatccggcgccagcggttacgcagcgcgatggctacggcgcgcttggcatcgtcctggccgatgatatggcgattgagttcatggacgatttcgcggggagtcatggacatagtgtttggcggcctcaagcgggaataagcctacggcttactcggcgaggtcctgctcctcaatggtgaagttgtggttggtgaacacgcagatatcgccggcgatacccagggcggtctcgacgatttcgcgggccgacaggtcggttttcttcaacagtgcgctggctgccgcctgggcatagccaccgccggaacccatggcgatcaggccatgttcgggctcaaccacatcgccgttaccggtgatgatcagggacgcgtctttgttggcgacggccagcatggcttccaggcggctgagggaacggtcggtgcgccattctttggcgagttcgacggcggcgcgcacgaggtggccctggtgtttttccaactggccttcgaaacgttcgaacagggtgaaggcgtcggcggtagcgccggcaaagcccgcgagaacctggccgtggtacaggcgacgcactttcttggcgttgcctttcatcacggtattgcccagggaaacctggccgtcgccgcccatgacgactttgccgtggcgacgtactgaaacgatggtggtcaaggggagagtctccacgcagcggggcgaaaatgccctgatggaaactcatatgggggtnnnnnnnnnnnnnnnnnnnnnnnnnnnnnnnnnnnnnnnnnnnnnnnnnnnnnnnnnnnnnnnnnnnnnnnnnnnnnnnnnnnnnnnnnnnnnnnnnnnnnttgcccccgatggcagtgtgtcagtcaccgaaaatgttgactgatctactgctatcgggggcaagccccctcccacattctgatcggtgttgagcttgaatcagcggctctggcgttgttgtaacaacaggttgctaaagcccgcaccagccagttgcttctgcgctacagtcagttgttcacggttgctgaacggacccaccagtacgcgataccaggtcgcatccttcaccgtgccagactccaccgtcaccgactggcccagcagaatgatctgcgcccgcacgcgatccgcatctgcctgtttggggaacgagcctgcttgcaggaagaacttggttaccggcgcggccttggtctcggccaccggcggtgccggcggcggggtgatcccggccaatgcggcctgggcacgcgccgtgtcgatcttcgcggcttccgccggggtgaccggggtggtcggcacttgcggcgtcggcagggttttctccggcacggcgtccggcggcacgatcacttccgattcgggcaacagtgtgtagaagtcgtacttcggcttcaccggagcggtcgggctcggcgcagtcttgttggcttcggccattttcgtagccttctgctgctcctgcttgacccgtttgacgtcatcgcccttgcccggatccagtttcatcaggaacacgataaacgcgccgacggtgaggccgatcgccatccacaaccagcccgggatcggcttcttcgccggggcctggtagcggctggcgccgcgcttgggtgctggttttttcttggcagccaacttacatacgctccagtgtttccaggcccaacagttccaggccttgcttgagggtccgtccggccagggcggcgaggcgcaggcggctttgcttctgggcttcgtcgtcggcggtcaggatcgggcagttctcatagaagctggagaacaggccggcgacttcatacaggtaggtgcacaggatgtgcggcgtacctttctcaccgacgctgttcagcacttcgccgaattgcgccagcttggcagccagttcctgctcgtgcggggcgtccagcacgatgtgcccttcaacttcgctgaagtccttgcccagcttgcggaacacgccggccacacgggtgtaggcgtacagcaggtacggtgcggtgttgccttcgaaattgagcatcagctcgaagttgaagctgtagtcgctggtgcggtgcttggacaggtcggcatatttcaccgcgccaatacccaccacgcgggcgatgttgcgcaggtcggcctcggccaactccgggttcttttccttcaccaggttgtaggcacgttcctgggcttcggtcagcaggtcgatcagcttcacggtgccgccgtcacgggtcttgaacggacggccatcggcgccgttcatggtgccgaagcccatgtgctccatgtgcatcgggtgggtgacaaaacctgctcgacgcgccacttcgaagacttgttggaagtgcagggcctggcgctggtcgacgaaatacagcgcacggtccgccttgagcacgccactgcggtagcgcacggccgccaggtcggtggtggcatacaggtagccgccatcggccttgacgatgatcaccggcagcggctcgccatcggcggtcttgaactcttcgaggaacacgcactgcgcgccgttgctttccaccagcaggcctttggccttgaggtcgttgaccacgttgatcaggtcgtcgttgtaggcgctttcgcccatcacgtcggccatggtcagcttgacgttgagcagctcgtagatttcctggcagtgcgacagcgagatctcacggaagcggttccacagcgccaggcattcctgatcgccggcttgcagcttgaccaccaggccacgggcgcggtcggcgaactcttcggattcgtcgaagcgcttcttggcggcgcggtagaagttttccaggtccgacagctcgttgctggtgatcgggttctcttgcaggtaagccatcagcatgccgaactgggtgccccagtcgcccacgtggttctggcggaccacggtgtcgccgaggaactctagcacccgtgccacgccgtcgccgatgatggtggagcgcaggtggcccacgtgcatctctttggccaggttcggtgccgacaggtcgatgaccacgcgctgcagtgggccggccttgcgcacgccgatcctggcgtcggccagggctgcatccaggcgcgaagcaagggcctgggtattctggaagaagttgataaaaccggggccggcgatttcggccttggtgacgctttcgtcggcaggcagcgcggcgatgattttttccgccaggtcgcgcggtttcatgccggccggcttggacagcatcatcgcaatgttgctggcgaagtcaccgtgggtcttgtcgcgggtgttttccacctggatcgccggcgacaggccttcaggcaacacaccttcgttgacgagttgggtgagggcttgttggatcagctggcgaatggtgtctttcatggtgttctctttcgaccgcaagcggcggcgcgcgatgcgcaggtggaaaaactgggcattatccgtggcgagggcgggcttgccaaccttcgcgggacctgtggccagggttaatacaaatctaccgggtctacgtccaacgaccatcgcacttgccggccgctgggcatttgctccagggcaagcaaccagctacttaataggcggtgcagcggcgcacgggaggttgcctgcaaaagtagctgagcgcgatagcgcccggcacggcgctccatgggtgcaggcaccgggccgagcagttcgatgccgctcagacccagttcgcccagcaaacgttcggcggcgctgcacgcttcatccaggaagctctcggcctgccctggtttgtgcgcctcggcgcgcagtaatgcaaggtgggaaaacggcggcaggccggcggcgcgacgttcgctcagggcctgttcggcgaaggcgaagtagccttgctcggtcagttggatcagcagcggatggtcggccaggtgcgtctggataatcacccggccaggctcctcggcacggcccgcacggcccgcgacctgtacgatcaactgcgccatgcgctcgctggcgcggaaatccccggagaacagcccgccgtccgcatcgaggatcgacaccagggtcacccgtggaaagtgatgtcccttggcaagcatctgcgtgccgatgaggatgcacggctggcctttctggatggtggcgaacagctggttcatcgcgtctttgcgcgacgtgctgtcgcggtccacccgcagcaccgggtaatccgggaacaggatgcccaggcgctcttcggcgcgctcggtgcctgcgcctaccggtcgcaggtcgactttgccgcactgcgggcaatggcgtggcacccgctccacatggccgcagtggtggcagcgcagttcgccgtggcgctggtgcacagtcatgcgtgcgtcgcagcgttcgcactcggacatccagccgcagtcatggcacagcagggtcggcgcaaaaccccggcgattgaggaacaccagcacctgttgaccggcggcgagggtctggccgatggcttgttgcatcggcccggaaatgccgctgtccagcgggcggcttttgacgtccaggcgcaggaaacgtggttgcttggcaccgcccgcccgctcgttgaggcgtaggaggccgtaacgaccggtgtaggcgttgtgcaggctttccagggacggcgtggccgagcccagcacaatcgggatgtcttcctggcgcgcgcgcaccagcgccaggtcgcgggcgtggtagcgcaggccttcctgctgtttataagagccgtcgtgttcctcgtcgatgatgatcagcccggggtttttcatcggggtgaacagcgccgaacgggtgccgataataatgtcggcctcgccgtcccgcgccgccagccatgactccaggcgctcgcggtcgttgaccgccgagtgcaccagggcgatgcgcgcattgaaacgctgctcgaagcgcgccagggtctgcgggccgaggttgatctcggggatcagcaccagcgcctgtttgccggcttgcagggtctcgcggatcaactgcaaatagacttcggtcttgccgctgcccgtgacgccggccagcaggaacgcgtggaagctgtcgaagcctgcgcgaatcgcctcgtaggcggcgcgttgctcggggttcagcggcaattccggctgggccagccagtgttcgtggcgggcgtcgggggcgtgcttgcgaatttccacctgcaccaggcctttggcgagcagcaggtcgaggctgtctttgctcagcatcagcttgctcagcagctgatgcgccacgccatggggatgctgcgccagcgtggccagggcctcgcgctggcgcggcgcgcgggcgatacgcgggtcgtcgaggcgcgcgccgggcaccatcgaccagaagcgttcctggcgcgcttcggccagttcgccctggcgcagcagcaccggcaacgcccagctcaaggtgtcgcccaggctgtgctggtaatactgggcggtccacaggcacagcttgaacagcgcgggcggcagtggtggggtggcgtcgaggatggccagcgcgggcttgagcttctcggccggtacttcgctgtgatcggtgacttcaaccagaatgccgatcatctctcggcgcccgaacggcacgcgcacacgcatgcccggttgcaactgcgcccgcagtacgccggccggcgcccggtaatcgaacaggcggcgcaggggcgagggcagggctaggcgcagaatggcgtcgggcacgcggggagtctcatataaaggcaggcggtggcgcaggggcgggagcctagcagacaggggagggcttgggtatgccacggttttctgatgaaaggaggttttcagccggatgtgcggcttgcgcgattgaaaaggtctggtagaatccgcggcctaattacgtgcggtattcgacaatagtgtcgagtggcggcacgctagcccgaggaagtgccatgaaagccgatatccatccagcgtacgaaaccatcgaagtcacctgcagctgcggcaacaagttcgaaacccgttcgaacctgtgcaagccactgggtactgacgtatgcaacgagtgccacccgttctacaccggtaagcagaaaactctggacaccggcggccgtgtacagcgcttcgcagatcgctttggtgctttcggcaagaagcctgctgctactccagcagagtaaggctcaaaagccttatgggcttttgccagctgttgaaaaaggcgtcccttgtgggcgccttttttgtgcctgggatttggccttcagtcgcacaggccgacgtgttttgccccgcaccggccgccctggcccgggtggatgtgcagcgtgtggtggatggcgacaccgtgcgcctgaaggatggccgcagtctgcggatgatcggcctcaatgcgcctgaaaccggcaagaaaggccgctccgacgagccctatgccgttgcggcccgccagcgtttgcaggcgttggttgaggccagtggcggccgggttggcttggtattggggcgcgagagcaaagaccgttacggccgtaccttggcccacctttacggcgctgatggcgagaaccttgaggcgcaactgctggccgaggggctggggttccaagtgggcgtcgcgcccaacgtcgatctggtcacctgtcagcaggctgctgaaaacagcgcccgtcaggcgcgattgggcctgtggcgcaaatcacccgtgctaagcgtggcacaactcaagcagtccggcttcgccttggtcagcggccgagtgagcaagatcgaacgcaatcgcggcggaatctggatcgaattgcagggctcactggtattacgcattgcacccgaactcactcgccacttcgactccgcattgctcagtggtctgcaaggcaggacaatcgaagcccgtggctgggtgcaggatcgatccaaacggggtggccggaaaaacggtcaggcacgttggttgctgccactgaccgacctcagcatgctcaaatcgactgattaataaaaaattgtagacatttttttattcgattgtgaacagttaagcccttgtatcccgtggccttagaccaaagtacggcgctttggggccttgacacctgtgactacccagtcttgtagggactttgcgacacgcgtatcctcggcggtccgtcgaccaacagtaaaagcggaatgccgatatgtctgatttgaaaactgccgctctcgaatatcatgcccatcctcgtccaggaaagctgagtgtagagctcaccaaggccactgccaccgcccgcgacctgtcgctggcctacagccctggtgttgccgagcccgtacgtgaaatcgcccgcgaccccgaactggcgtacaagtacaccggcaaaggcaacctggttgcagtgatttccgatggcaccgcgattctcggcctgggtaacctcggcccattggcttccaagccagtcatggaaggtaaaggcgtgctgttcaagcgctttgccggcatcgacgttttcgacatcgaagtcgactccgaaagcccgcaggcgttcatcgacacggtcaagcgcatttccatcactttcggtggcatcaacctggaagacatcaaggcacctgagtgcttcgagatcgaaaaggccctgatcgaacagtgcgacattccggtattccacgatgaccagcacggcaccgcgatcgttaccgctgccggcatgatcaacgccctggaaatcgctggcaagaccctggctgacgcgcagatcgtctgcctgggcgccggcgctgcggccatctcctgcatgaagttgctggtgagcatgggcgccaagctggaaaacatcttcatggtcgacagcaagggcgtggtccagtccgagcgtaccgacctgaaccagtacaaggcgatgtttgcccacgccaccgacaagcgcaccctggctgacgccctcgacggtgcagacgtgttcgtcggcctctccggcccgaacctgctgagcgccgaaggcctcaagtccatggcggccaacccgatcgtgttcgcctgctccaacccggacccagagatctcgccggaactggcgcacgccacccgcaacgacgtgatcatggctaccggccgttcggactacccgaaccaggtcaacaacgtactgggcttcccgttcatcttccgtggcgccctggacgttcgcgccaagcgcatcaacgaagagatgaaagtagccgccgccaatgccctgcgtgaactggccaagctgccggtgcctcaggacgtgtgcgacgcctacggtggcgccaagctggaattcggtcgtgagtacatcatcccgaaaccaatggacaagcgcctgatcaccctgatctccgatgccgtggccaaggccgccatcgagaccggcgtggccaccctgccgtatccgaagcactacccgctgcaaagcgtggatgatgtgttcaacggctaagccgttgtagcgcaccaacaaaaagccccggttcttgcgagtcggggctttttgctgtgtggtgttcgccgatggcctttgtagtgagcgggcaagcccgctcactacaggtcagaacagatcgatcggcgccgcttcatctgccggcagcgggctacccggtgcaacgccattgcccagctcgttgaccgacggcggcgtgtcttcgctcttgaacagttcgaagtacgcgttcggcgtgcttggcgacgctgcacggccgctgatcgggtcgatgcgcaggctgaggatgccttccggctccggctgggtgtgcggcggcttgtccttcaaggctgcgcccatgtagctcatccagatcggcagcgcaacggtgccaccgaactcgcggcggcccaggctttccggctggtcatagccggtccacacggtggtcacgtagtcggcgttgtagccggagaaccaggcatccttggattcgttggtggtaccggtcttgccggcgatgtccggccggttcagcgccagagcgcggcggccggtacccttcttgatcacatcttccaggatgctgttgagaatataagtggtacggccgtcgacaatacgctcggcaactgccggcgcctgtggctccgccggggtaccgttggcggctggcgtggtgcctggggtcggctcgatggtgataccgccattgctcggcgctgccagcccatcggtggcggccacgccgttgaccacgtcgcctggcacgcgtggcgggttggcggtgaacagggtgtcgccgttgcggctttcgatcttgtcgatcaggtacggcgtgatcttgtacccgccgttggcaaaggtgctccagccggtggcgatttccatcggtgtgagggtcgcagtgcccagggccagggagaggttgggcggcaggtctgacttggcgaaaccgaagcgcgtcatgtaatcgatggtcttgcccacgcccattgcctgcagcaagcggatcgacaccaggttgcgcgacttgtacagcgcttcgcggatgcggatcgggccaaggaaggtgttggtgtcgttcttcgggcgccagaccttgtccaggtactcgtcgacaaacacgatcggcgcatcgttgaccaggctggcggcggtgtagccgttgtccagcgcggcactgtagatgaacggcttgaagctagagcccggttggcgcttggcttgggtggcgcggttgtagttgctctgctcgaacgcgaaaccaccgaccagggcgcggattgcgccgttctgtgggtccagcgacaccagtgcgccctgggccaacggcacctggctgaacttgaggctgtcgtccttctgacgttgcacgcggattaagtcacctacctgcgctacgtccgacggctgcttgggcatcgggcccatgctgttggtgttcaggaacgggcgcgcccatttcatgctgtcccacgccacatgggcttcgccggtgcgggtcaggacctgtacgccatctttcttgacctgggtgacgatggccggctccaggccgctgatcgcacgttgtttgcccagttcggtggtccaggcactcagggtcttgcccggcaggcgtgattcggggccgcggtagccgtgacgctggtcgtaggtgatcaggccggaatgcaccgaattattggcgatgtcctgcaagtcgctcggcacggtggtagtcacgcggaaaccttcggtatacgcctcgctgccatagcggccgaccatctcggcgcgggccatttcggcgatgtaaggggcgttcacttccggggttggtacgtggtagctggcgttcaacggctcggcgatggcgctttcgtaagcggcctggtcgatcttgcccagcttgtacatgcgtcccaggatccagtcgcggcgctctttgctgcgcgccgggttggccagcgggttgaagcgtgatggcgccttgggcaggccggcgatcatggccatctgcgccaggctggcatcacggatggacttgccatagtagacctgcgaggccgcctcgatcccgtaggcgcggttgcccaggtagatcttgttcacgtacagctcaaggatctcatccttggtcaactggcgttcgatctgcaacgccaggaggatctcggtggccttgcgcgaaaagctgcgctcgctggtgaggaagaagttcttcgccacctgcatggtgatggtgctgccgccggattgaatgtgtccgctttttaccaattgtgtggccgcacgcaccaggctgctggggtcgacaccatagtggttggcaaaattatcgtcttcggccgagagcagggcgctgatgaaattgggtggaatatcggcaaaacggatcggtgtgcggcgcatttcgccgaactccgcgatcagtttttcatcgctgctgtagacccgtaaaggaatctgcaactggatacttctgagggcctctacggagggcaaacccggactaaggtagaggtaggccccgctgagcacgagcagcagcccgcaaacgatggcgacaatggagtacccgaaaaacttcagcagacgaatcaaggcttttggatttccagagaaaagaatgggttaggcgtcggggctggcatggcaaacgatggatcgacccgagctgcagataaaaagcggcaaaaaacgctgggcattaaagcatttttcgacttggggcgtcattcgcacctgctcaacaagtcgaccgaatgcatgacgcccggcggcaatcaggcggtatgacaggcaaagctttagggagttttatgggaaaaggatttttcacgggaaaactcgacaccttgctgggcgtcgacatcaatgacacggcaatccggctggtggagctgggccgttcaacctctggttacaacattcgcggctacgtcacccaggcattgccgatacgctcggtggtcgacggcacattcctggatctcgaaggcgtgggacgcaccttgcgcagtgcattgtcacggttggcgacgtcggtccgtggcgctgccgctgcggtgtccgggccttcggtgatcacgcgcatgatcgagatggaggcggggctgactgacgatgagatggcctggatgatccagatggaggcagaccagtacattccttatccattggatgacgtggccatcgactttcaagtgcgtgggcctaccgccctggacccaggtcgtgtcgaggtgctgctggcggcgtgcctgaaggaacatgtcgaggcacgggaggcggttctggcgctggccgggctggtgccgagggtgatcgatgtcgaagcgtttgcattggcgcgcgcttgcagtcaggatttcgccagcttcacgccgagccatcgagtcgatggtgcacaatgggccgtggacgcccaggggatgggaattgcttgcgggttggccctgaggagtttcgcttgaagacacgaatcaaccttttgccttggcgccaggcgctggcggagcggcgacgcaagtacctgctggcgtgtttgctggcgttcgcctgcgcggcgcttgcggctgtgtggctggcggaccaggtgatcgaccaggccattgaccggcaagtgacccgtaatgaccatctgggcaagcaaatcaccggcctcgattcgcgcatcaggaccatcgacgacctgcaggagcaaagccagcagttggcacagcgcatgaaggttgtgcaggacctgcacgactcccgctcgtccggcgcgcaattgttggatcagttggcgcgcgcagtacccgatggtgtgcatctgcatgaagtggtggcgaagggcgatacggtgagtatcagcggcagtgccgaatccagccaggatatcgcccaactgatgcgtcgcctggaggccgcacaaggcgcccattccacgcggttgcaacaggtgcgaaccgaaggtgcgcggggcaacaatgaattccagttgatggtgcgacagggcgagcccgccgaggcgcaaccttgagcccgttgaggctcaatctttctgcactcactcacaacgctgcaaaatggcccctacctggcaaggccctgttgggctgtgcgctggcgagtctgatatttgtggtgggtgaccttgtttgcctgagcccgtcgcggcagcggctaagccaggtcgaggtgcgggaagtggccctgcaacagcaagtcgctgaaaagacggccctggctgccccccttgaggtgcgcacccagcagctccaattgatgcaggcgaaagcggatgagcttttccgggcgttgccggggaaatccgaaatgcccggcttgctggaagacatcgcgcacttggcagtggccaatggtctggtggtcgagagtgtcacgccatcggacgaacagtctcagccgtactatcacgagcagccggtacaggtcggcgtggcaggggcttaccacgacctggcgacgttcctgagtagcttgggtggtctggcgcgaatcgcgacggtgcacgatgttgtcctgcgacgtgatggcaatctgctgcgccttgatgtgctggtcaagacctattggcagccgggcggcgggggaggtggtcaggcccgccaggggcaactctttgtctacgaggcttccgggctgcgcgacccttttcaacggcttgccgttcaggtcgatcacctgcctgggcggcccgcgcgtgcgccagacctcgcccggccacgcgcagccctggaaagccttgcgttggaccagttcgaaatggtcggcacgctgtcccgcgggtcgcaggtcttcgccttgctgcgtgcggcctccacggtgcatcgcctggcggtcggtgactacctggggccggaccatggccgggtcacggccatcgatgagcgttacatagagctggtcgagctgtttcccgatggtcagggggcatggctggagcgcccacgaaccctggtgttaaacgtcaactcataacggaatcgaatcaatgaaaaggattttctcgtccttcggtgtagcgctatggatagcgttcacggcgccgatggctgttgctgtgcccaatcgtgtagacctgatccagttgccaccgcctggcaatgccacgtcgggcgcctacaccggcgataagctgaaccttaacttccagagcatcgagttgcgcaccgcgctgcaacagattgccgatgtagcgggcctcaatctggtagccagcgacgatgtgcagggctcgattaccctgcgcctcaaggatgtgccctgggatcaggcgttggacctggtgctgcaagccaagggcctggataagcgggtaaaggccggtgtattgctggtcgcgccggccgaggagttggcggcgcgtgagctgctgaccctggaatcgcgcaagcaaatggctgaactggcgccgttgcgtcgggagctgttgcaggtcaattacgccaaggcggcggacctggccaagttgtttcagtcagtcacgggccttgagggcgtcaccgacgagcgtggctcggtggcggtggatgatcgcaccaacaacatcatcgcctatcagactggcgagcggctggaggagctgcgcaggatcgtggcgcagttggatgtgccggtgcgccaggtgatgatcgaggcgcggattgtcgaggccaatgtcgattacgacaaaagcctgggcgctcgctggggtgggcggctcactcgcggcaactggggcgccggcggtattccgaagcctctggcggatggcgcggagcctgcggaaaacccacccagttcaccttttgtggacttggggtcactcaccggctcatcgggcctgggcatcgcctttatcaccgacaacctgctgctggacctggaactcaccgccatggagaaaaccggcaacggcgaaatcgtctcgcaacccaaggtggtcacttccgacaaggaaaccgcacgcatcctcaagggcaccgagattccctaccaggaatccagctccagcggcgcgacctcggtgtcgttcaaggaagcctcgctgtcgctggaggtcaccccgcaaatcacccctgacgaccgcgtgatcatggaggtgaaagtcaccaaggatgagcccgactacctgaacaaactcaacgatgtgccgccgatcaagaaaaacgaggttaacgccaaggtgctggtcaaggatggcgagaccatcgtcattggcggggttttctccactacccaaagcaaagtggtagataaagtgccatttttgggcgatgtgccgtatcttggccgccttttccggcgcgatgtgctggcggagaaaaaatccgagctgctggtattcctgactccgcgtattatgaataaccaggcgattgctgtgagtcgttgattctgtgcgaaatttgattcttgtaggaccgatgggggctggaaaaagcaccatcggccgtttgctggccaaagagctgcgcctgccgttcaaagattccgacaaggaaattgaattgcgcacgggcgccaatatcccatggatcttcgataaggaaggcgaactgggctttcgtgaccgcgagcaggcgatgatcgccgagctgtgcggctgcgatggcgtggtattggcgacaggtggtggcgcggtgatgcgtgacgagaaccgccgcgcgctgcatgccggtggtcgggtggtctacctgcatgcgtcggtcgagcagcaagtgggtcgcaccgcccgtgatcgcaatcgcccgttgctgcgtacggccaacccggagaaaaccctgcgggatctgctggcgctgcgagatccgctgtatcgggaaattgccgatctggtggtagaaaccgatgagcggccaccccggatggtggtcctcgacattcttgagcgcctgcaacggctgccaccccgttaaagccaggcccgaaatgcgctattctcggcggcgcgccaacacctcccaaggtgtggcgtagagccatcaggcgacgtcagcgtttgacgttgccggtcgtcaatacatcttcaacgcggggacacatgcagacacttaaggtcgatctaggcgagcgcagctacccgatccatattggcgaaggtctgctggaccagcccgagttgctcgcaccgcatattgccgggcggcaagtggcgatcatctccaatgaaacggtcgcgccgctgtatcttgagcgtctgagccgcagcctcgcggcgtactccgttatttctgtgatcctgcccgacggcgaggcccacaagaactgggaaaccctgcaactgatctttgatggcctgctgactgcacgccatgaccgccgcaccaccgtgatcgccctgggcggcggtgtgatcggcgacatggccggctttgcagcggcctgctaccagcgtggcgtggactttatccaggtgccaaccaccctgctgtcccaggtcgattcgtcggtgggcggcaagaccggcatcaaccacccgctgggcaagaacatggttggcgcgttctaccagccgcaagccgtgctgatcgacaccgcgaccctcaacaccttgccgccgcgtgagctgtcggcgggcctggcggaagtcatcaagtacgggctgatctgcgacgaaccgttcctgacctggctggaagaacatgtcgacgcgttgcgcaacctggaccaggcggcactcaccgaagctatttcccgctcctgcgccgccaaggcgctggtggtgaatgccgacgaacgggagtccggcgtacgggccacgttgaaccttgggcacaccttcggccatgcgatcgaaacccacatgggctatggtgtgtggttgcatggagaggccgttgcggctggcacagtgatggcattggagatgtcgcagcgcctgggctggatcaacgcccaggagcgtgaccgtggcatccgcctgttccagcgcgccggtttgccggtgattccgcctgaggaaatgaccgaggcggatttcctcgaacatatggcaatagacaagaaagtgatcgacggtcgactgcgactggtgctgctgcgccacatgggcgaagcggtggtgaccgacgattatccgaaagagattttacaggccacgctgggagcggattaccgcgccctggcccagcttaaaggttaataagatcccgatgactagtttgcatgccgacgaggcgttcctcggccattaccagttaagccacgacccttttgctccacgggtgcctggtttcaaatttttcccggcccagcgcaagccagtgctcggtcaactgcaccatctcgcgcgctacagccagttgctgctagtcgtgaccggcccgctgggcagcggcaagaccctgctgcgccaggccctggtggccagcaccaacaagcagtcggtccagagcgtggtggtgtcggcccgtggtgccggtgatgcggcaggtgtcctgcgccaggtcgcccaggcactggacgtggccactgccgagccgaacgcgatcctcaagcaggtggtgcagctgggcctgaccggccaggaagtctacctgctggtggatgatgccgagcagctcgacgaatccgccctcgaagcgctgctggcgctggcggcgggcacgccggaaggccgtccgcatgtattcctgttcggtgagtcgtcgctgatcgccgacctggagcagatcagcggtgatcaggagctgttccacgtcatcgaactgcagccgtacgaagaggaggaaacccgcgaatacctggctcaacgcctggaaggtgcaggggcgggtatcgaacttttctccgctcaacagatctctgatattcacgaaagctccgacggctggcctggcaccatcaaccaggttgcccgcgatgccatgatcgaagccatgattgccagccgcaccgcggtcaagcgtccaaagatggggttcactatgcctaagaaacacgtattggctatttccgccgttgttgtggtcgctgttgccgccgcctggttgattccgggtcgcagcaaggcgccgaccaccgccggtgcgccaaccgagcaggcgcaattgccactgggcaaacccacgccaaatgttgagttcgccaattccggccagccgaccaacctgccgatggtcggccagcctgtcatgcgtggcccgctcgccgaagaagccggtggcatttccgaaggcgacgacggcgtgccggtggaaggttccagcgccacaccgccgaccgtcacgaccacagcaccacctgctggcgtgccagccggtcagccagcggcaaaaccaacgccggcaccgactgttgcaaccgccaagccagcgcctgtgaccaagccggtcgcgcctgcgccagccgccaagccagcgccagccccggccgccaagcccgctgaaaaaccagctgccaccgttgccaaggccggtgctgcgggtagcggttggtacggcagccagccttccggtaacttcgtggtgcagatcctcggcaccagctctgaagccaacgcccaggcgttcgtgaaagagcagggcggcgagtaccgttatttcaagaaagtgctcaacggcaagcctctctacgtgatcacctatggcagtttttccagccgtgcagcggctgattctgccatcaaggccttgccagcgaaggttcaggctggtaaaccttggcctcgcactgttgccagcgttcaacaagaactcgcaacaactcgctgaagatcaggcggccttacccaggccgccctcccggcacctcaaaaaaactacaacagcgtgcagccctgaaggccgcgcgctttgtggtgtctgcgtcacagtggcttttgagtcgtagcggtcagaattaaaaaagttttgactagcacagcatatcgctttaaacctttcataaatgcgacatagatttgcgacatttcgtcgctaaatttgtgagcgtctgtgtcggtgtgtacaatgacctcccttttgcccccgctaagccggcgtacgttcggcgtggaaggtaaccggttgaattgaaaagaaatttgcctcgaaataagaggcagcctggtgagaaagtgtctatgaaagcaggtctgtaccaacccgatgaattcaaggataactgcggtttcggcctgatagcccatatgcagggcgagcccagtcatacccttctgcaaacggccatcgaggccctgacctgcatgacccaccgcggtgggatcaacgccgacggcaagaccggtgacggttgcggcttgctgattcaaaagcccgacctgttcctgcgcgctgtcgcaaaagagcaatttgcggtcgacctgcccaagcagtacgcggtgggcatggtgtttttcaaccaggacccggtcaaagccgaagctgctcgcgagaacatgaaccgcgagatcctggctgccggcctgcaactcgtcggctggcgcaaagtgccgatcgacaccagcgtactcggccgcctggccctggaacgcctgccgcagatcgagcaagtgtttatcgcaggcgatggcctgagcgaccaggacatggcgatcaagctgttcacgtcgcgtcgtcgctcgtccgtggccaacgccgccgacaccgaccactacatctgcagcttttcccacaagaccatcatttataaaggcctgatgatgccggcggacctcaccgccttctatccggacctgagcgatgagcgcctgcaaaccgcaatctgcgtgttccaccagcgcttctccaccaacaccctgccgaaatggccgctggcccagccattccgcttcctcgcccacaacggcgagatcaacaccatcaccggtaaccgcaactgggccgtggcccgtcgcaccaagttcgccaacgacctgatggacctggaagagctcggcccgctggtcaaccgcgtgggttccgactcctccagcatggacaacatgctcgaactgatggtcaccggcggcatcgacctgttccgtggcgtgcgcatgatcattccgccagcgtggcagaacgtcgagaccatggacccggacctgcgtgcattctacgagtacaactcgatgcacatggagccgtgggacggcccggccggtgtcgtgatgaccgacggccgctacgcggtctgcctgctcgaccgtaacggtctgcgcccggcgcgttgggtcaccaccaccaacggtttcatcaccctcgcgtcggaaatcggcgtgtgggactacaaacccgaagacgtcatcgccaaaggccgcgtgggcccaggccagatcctcgccgtggacaccgaaaccgggcagatcctcgacaccgacgccatcgacaaccgcttgaaatcccgtcatccgtacaagcaatggctgcgcaagaacgccctgcgcatccaggcgaccatggaagacaacgaccacggttcggcgttctacgacgtcgaccagctcaagcaatacatgaagatgtaccaggtcacgttcgaggagcgcgaccaggtgctgcgtccgcttggcgaacaaggctacgaggcagtcggctccatgggcgacgacacgccgatggccgtgctgtcccagcgcgtgcgcacgccgtacgactatttccgccagcagttcgcccaggtgaccaatccaccgatcgacccgctgcgcgaagccatcgtgatgtccctggaagtctgcctcggtgccgagcgcaatatcttccaggaatcgcctgagcacgcctctcgtgtgatcctcagctcgccggtcgtgtctccggccaagtggcgctcgttgatgaccctggagcgtccaggcttcgaccgccagatcatcgacctgaactacgacgaaagcctcggccttgaagccgcggtgcgcaacgtcgccgaccaggccgaagaagccgtgcgcgccggtcgtacccagatcgtcctgaccgaccgccacatcgcgccgggcaagctgccgatccacgcctcgctggcgactggcgcggtgcaccaccgcctgaccgaaaaaggcctgcgttgcgactccaacatccttgtcgaaactgccacggcccgcgacccgcaccactttgcggtgttgatcggcttcggcgcctcggcggtgtacccgttccttgcgtacgaagtgctgggtgacctgatccgtaccggtgaagtgctgggcgacctctatgaggtgttcaagaactaccgtaagggcatcaccaagggcctgctgaagatcctgtcgaagatgggcatctccaccgttacgtcctatcgcggtgcgcaactgtttgaagccatcggcctgtccgaagaagtctgcgacctgagcttccggggtgtgccaagccgcatcaagggcgcgcgtttcgtcgacatcgaagccgagcaaaaagccttggcagccgaagcctggagtgcgcgcaagccgatccagcaaggcggcctgctcaagttcgtgcacggtggcgaatatcacgcgtacaacccggacgtggtcaacactctgcaagccgccgtgcagcagggcgactacgccaagttcaaggaatacacctcgctggtggataaccgcccggtgtcgatgatccgcgacctgttcaaggtgaagaccctggacacgccgatggacatcagcgaagtcgagcccctggagtcgatcctcaagcgcttcgactccgccggtatttccctgggcgcgttgtcgcctgaggcgcacgaagcgctggccgaagccatgaaccgcctgggtgcgcgttccaactccggcgaaggcggtgaagacccggcgcgttacggcaccatcaagagctcgaaaatcaagcaggttgctaccggccgtttcggcgtgaccccggaatacctggtcaacgccgaagtgctgcagatcaaggtggcccagggcgccaagcccggtgagggcggccaactgccaggcggcaaggtcaacggtttgatcgccaagctgcgttacgcagtgccgggcgtgacgctgatttcgccgccgccacaccacgatatctattcgatcgaagacttgtcgcagctgattttcgacctgaaacaagtcaacccgcaggccctggtctcggtgaaactggtggcagaagccggcgtgggcaccatcgccgctggcgtggccaaggcctatgccgacctgatcaccatctccggctacgacggcggcaccggcgcttcgccgctgacctccatcaagtacgccggtgcgccgtgggaactcggcctggccgaaacccaccagaccctgcgcggcaacgacctgcgcggcaaagtgcgggtgcagaccgacggcggactgaaaaccggcctcgacgtgatcaaggccgcgatcctcggcgccgaaagcttcggcttcggtactgcgccgatgatcgccctgggctgcaaatacctgcgcatctgccacctgaacaactgcgccaccggcgtcgccacgcagaacgagaagctgcgcaaggatcactacatcggcaccgtcgacatggtggtgaacttcttcacctacgtcgccgaagagacccgtgagtggctggccaagctgggcgtgcgttcgctggaagagttgatcggccgtaccgatctgctggaaatcctcgaaggccagacggccaagcagaaccacctggacctgacgccgctgttgggcagcgatcacatcccggccgacaaaccacagttctgcggcgtggaccgcaacccgccgttcgacaaaggcctgttggccgagaagatggtcgaaatggccggctcctcgatcaacgacgccagcggtggcgaattcgccctggatatctgcaactgcgaccgttccattggtgcacgcatctccggcgaaatcgcgcgcaagcacggcaaccagggcatggccaaagcgccgatcaccttccgcttcaagggcaccgcgggccagagcttcggcgtgtggaacgccggcggcctgcacatgtacctcgaaggcgacgccaacgactacgtgggcaagggcatgaccggcggcaagctggtgatcgttccgcccaaaggcagcgtgtacaagacccaggacagtgccatcatcggcaacacctgcttgtacggcgccaccggtggcaagctgttcgccgccggtaccgccggtgagcgtttcgccgtgcgtaactccggtgcccacaccgtggtggaaggcaccggcgatcactgctgcgagtacatgaccgggggctttgtcgcggtactgggcaagaccggttacaacttcggttcgggcatgaccggcggtttcgcctacgtgctcgaccaggacaacaccttcgtcgacaaggtcaaccacgagttggtcgagatccagcggatcagcggcgaagccatggagtcctaccggaaccacttgcagcacgtgctggacgagtacgtcgaggagaccggcagcgaatggggtcgtaacctcgccgaaaacctcgatgattacctgcgtcgtttctggctggtcaagcccaaggctgccaacctgaaatcgttgctttccagcatccgtgccaacccgcagtgatatgcgcctgaagagtttgatgaggttttaacatggctgaacgtctgaataacgacttccagttcatcgatgtcgggcgcaaagatccgaagaagaaactgttgcgtcaacgcaagaaagagttcgtggaaatctacgagcccttcaaaccccagcactcggccgaccaggcccaccgctgcctggggtgcggtaacccgtattgcgaatggaagtgcccggtgcacaacttcattcccaactggctcaagctggtggccgagggcaacatccttgccgctgccgagctgtcgcaccagaccaacaccctgccggaagtgtgcggccgggtgtgcccgcaggaccgtctgtgcgagggtgcctgcacccttaacgacggcttcggcgcggtgaccatcggttcggtggagaagtacatcaccgacaccgcgttcgccatgggctggcgcccggacatgtccaaggtcaagccgaccggcaagcgcgtcgcgatcatcggtgccggccctgccggcctgggctgtgccgacgtattggtgcgtggcggcgtgaccccggtggtgttcgacaagaacccggaaatcggcggcctgctgaccttcggcatccccgagttcaaactggaaaaaaccgtcctgagcaaccgtcgtgaagtgttcaccggcatgggtatcgagttccgtctcaataccgaaatcggcaaggacatcaccatggagcaactgctcgaagaatacgatgccgtgttcatgggcatgggcacctacacctacatgaagggcggttttgccggtgaggacctgccgggcgtgtacgacgcgctcgacttcctgatcgccaacgtcaaccgcaacctgggttttgaaaagtcgccggaagacttcgtcgacatgaaaggcaagaaggtcgtggtgctcggcggtggtgacaccgcgatggactgcaaccgcacctcgatccgccagggcgccaagtcggtgacctgtgcctatcgtcgtgacgaagccaacatgcccggctcgcgcaaagaggtgaagaacgccaaggaagaaggcgtgaaattcctctacaaccgccagccgatcgccattgtcggtgaagaccgcgtggaaggtgtgaaggtggtcgagacccgtctcggcgaaccggacgcccgtggccgtcgcagccccgaaccgatcccgggttccgaagagatcatcccggccgacgccgtggtcatcgccttcggcttccgcccaagcccggcgccgtggttcgagcagttccagatccagaccgacagccagggccgtgtcgtggctccggaacaaggccagtacaagcaccagaccagcaacccgaaaatcttcgcaggtggcgatatggtgcgcggttctgacctggtggtgacggcgatcttcgaagggcgtaatgccgccgaagggatcctggattacctgaacgtctaatctcgttcaagctgaaatgcggtcaaaaatgtgggaggggcggtgcgacgactcgacg

SEQ ID NO: 62 - DNA, 64649 bp, Pseudomonas nodulensis
  misc_feature (22518)..(22729): n is a, c, g, or t
  misc_feature (22856)..(23077): n is a, c, g, or t
aggggcggtgcgacgactcgacgcaccgcccctcccacatttatttttgcagcgctttcaagcccgcgacaaattgacccgatagacaaaaggcacggctcataccgtgccttttgcgtctggctctgagaaaatgcccgcactttttttgcggatgccgacatgactgccctcaagaacgaccgtttccttcgtgccctgctcaagcaacccgtggacgtcacccctgtgtggatgatgcgccaggccggtcgctacctgccggaataccgcgccagtcgcgccaacgccggcgatttcatgagcctgtgcatgaacccggagttcgcctgcgaagtcaccatgcagccgctggaccgctacccacaactggacgcggccatccttttttccgacatcctcaccattcctgatgccatggggcagggcctgtacttcgaaaccggcgaaggcccgcgtttcaagaaagtcgtcagcaccctggccgatatcgaagccctgccgattccagacccacacaaagacctcggttatgtgatggacgccgttagcaccatccgccgcgagcttaatggccgtgtgccgctgatcggcttctccggcagcccctggaccctggccacctacatggtcgaaggcggctcgtcgaaagacttccgcaagaccaaggctatgctctacgacaacccgcaagccatgcacttgctgctggacaagctggcgcagtcggtcacgtcctacctcaacggccagatcatggccggcgcccaggcggtgcagatcttcgacacctggggtggcaacctctcggcggcggcgtaccaggagttctccctggcctacatgcgcaagatcgtcagcggcctgatccgcgaacacgaagggcgcaaggtaccggtgatcctgttcactaaaggtggcggcctgtggctggaaagcattgccgacgccggtgctgacgccctgggcctggactggacctgcgacattggcgaagctcgccgtcgcgttggtggccaggtcgcgctgcaaggcaacatggacccgaccgtgctgtacgccaagccggaagcgatccgcaccgaagtcggccgcatactggccagctacggcaaaggcaccgggcatgtgttcaacctcggtcatgggattactccggaagtgaacccggagcacgctggcgcattcctgcgcgcggtgcatgagttgtcagcgcagtatcacgaataacacgcaaaacaaatgtgggagggggcttgccccctcccacatcaaagccagagaaactcaggccttcgcttgccccaacggcggcaacttcgccaacttcaacgccaccagcaacgcgccaatcaacaacgccacgataaacgcgccgatcccgttccacccggcgaagtgccagaagaacccgcctgccgttccggcaacactcgaccccacgtagtagcagaacagatacagcgatgacgcctgccccttggccttgaccgcgcgacggccgatccagctgctggccaccgaatgggcgccgaagaagccgaaggtgaagatcagcatgcccggcaccaccagccacagcgggctgaacagggtcagggccatgccggcgagcatcagcacgatggtgccccacagcacgcgacggcggccgaggcggtcggcgagggagccgattttcgccgagctgtagatgcccgagaggtacaccagcgacagcaggccgaccacggcctggctgaggtcatacggatcgcccagcaggcgatagccgatgtagttgaacatcgtcacgaacgcacccatcaacaggaaggcttcgaggaacagccagggcaggccggcgtccttgaagtgcatgacaaagccgtccaccaggctgcgcggcttgaggctggtggcgcggaagttgcgcgattcggggaggattttccagaataccgtggcggcgatcagcgccagggcaccgatgatcagcattgcggtgtgccaactgacgaagtcgatcaacacgccgatgatcaggcgcccgctcatgccgccgatggcgttgccgccgatgtacaggcccatggccaggccgatgtgctgcgggtggatctcttcgctcaggtaggtcatggccacggcggccaggccgctcagtgacaggcccaccagcgcgcgcatcagaaggatgccttcccaggttggcatcaggccgctggcgatggtggccagcgcggcgcagaacagcgcggagaccatcaccggcttgcgccccagccggtcggagatcggcccggtgatcagcaagccgaacgccagcatcgccgtggccaccgacaggatcaggctgctttgcgccgcattgatggaaaattcgagggacagcgccggcatcatcggctgcacgcaatacagcagcgcaaaggtggcgaaaccgccggagaacagtgccagcaccgtgcgcatgaacatcggcgtgcctttttcgatgtacgcgtcattgagctgggccaccacctcatccaaggcagtgggcggtacgtcttgagcgagtggagcgacagcagctttcacggggacctcggggaggaagagcctgccgggaccggcaatgcaaaaaagaatatagctcgctaatgattctttccaatatattgttcgacctgtttgatagctttaacgacctaatgaggtttgcatggaattgcgtcacttgcggtacttcatcgccgtcgccgaagaactgcatttcggccgggccgcgcaggtgctgggcatctcgcagccgccgttgagccagcagatccaggcgctggagcaagaggtcggggcacgcttgtttgagcggaccaatcgtcgggtcgagctgagcgaggccgggcggctgttcttgcaagaggcgcggttggtactggcgcaggtcgacaaggcggcggatgtggcgcggcgggcgcagttgggcgaactgggggagttgaagattggtttcacttcatcggcacccttcaactccagcattccccaggcgatctttgcgtttcgccaggcgttcccggcggtgcacctcaatcttcaggaaatgagcagcaccgaagtggctgagtcgctgatggatgagtcaatccaggtgggcctgatgcggccgctgccgttgccggattccttgagcgtggtcgagttgatgcgcgaacccttggtggcggtgttgaacgcggggcatccgttggtgcacggcagtgaacgtggtttgcacctggcgcaactggcggacgaaccgtttgtgtttttcccgcgcacctatggcagtggtctctatgcgcagttgctgaacctgtgccgtgacgcgggtttcagcccgcacttcgcccaggaggcgggtgaggcgatgaccatcatcggcctggttgcggcggggctgggggtatcggtgctgccggcgtcgtaccagcgcatacggatcgatggggtggtgtatcgcacgctgttggaccaggaagcgatgacggcggtgtggctggtacagcgcagaggtgtgcagacaccgatggcgaaggcgtttgtggagttgttgacgcgcaaggctgcccaataacctccggcaagcaagttgttgtggcgagcgagctttttgtggtgagcgggcttgtcccgcgctggagtgcgaagcgctcccaagatctttggggccgctacgcagcccagcgcgagcaagctcgctcaccacaacagcccgctcgccacaggtactgcgttagtcgtcaaatcggcactttgccacgggttgtcggaaggctgttttcaggcatactgccccaagttcccgaaaggggcttgtgagactctgaggatcctgggcaaccagccatcgcagagccaggcaggaagcggcgatgacaagccaacctgtttgtgaagagggcgccgaatggcgccctttgtcgtttctggagcagcgccggccttaattctgtttggagctgcccgtctgctcaaacagctgcgccgctgccccggtcccgtccgcgccgttgttgcgcaaccccgccatgatgtcgcgatccagcatgctcacccagcggttgtagttgcgatggatcttgccatccttgtagcccagttcgcggctatcgcggtaggtgatggcgtagctgttgcgggtgtagcggatgtcgatggcggcgtagtactggttacgcacattgatctcggcctgcaccagttgcgggctcaggcgttgtaccgtccattcgcgcttttgcagggcgttgacgatcaccattttcattttttcttcgctgacctgggcgttggccggcaggtcgtgctgggtgttgaggatcggcttgctggtgcaaccggcggtgaccagcagggccagggtgatcaaggtgacgcgtagcaaggaagacattccgttttctccaatcgattaaaaagtcaggaccagcggcggaagatcagcgaggtgttgacgccgccaaaggcaaagttgttgttcatcacgtagtcgtggtgcatctcgcggaactcaccttgcaggtaatccagctcgccgcattgcgggtctaccgaatccaggttgaaggtgtgcacgtactggtcgcggttcatcatctcgatgctgaaccacgactccaacgcgccacacgcgccgagggtatggccgaggaaactcttctgcgaactgatgggcatgcggctgccgaacaggctgctggtggccagggtttcagcgatgtcgccttggtccgtggcagtgccatgcccgttcacgtagccgatcgcggacggctcaagcccggcatcttccagggccagctccatggcgcggcgcatggttttctgctccgggcgggtggtgtgctggccgtcggcgttgctgccgaagccgacgatctcggcatggatatgcgcaccgcgcgccagggcatgttcgagttcctcgagtaccagcatgccgccgccttcgccgatcaccaggccatcgcggccgctgtcataggggcgtgggctggtttgcggggcgtcgtttttcaggctggtggcgtagagcgcgtcgaacaccatggcttcggtggggcacagctcttcggcgccgccggcgagcatcaacggcaggcggccgaacttgattgcctcgtaggcatagccgatgccctggctgccgctggtgcaggcgctggaagtgggaatgagtcgcccggtcaggccaaagaagatgctgatattcgccgccgtagtgtgcggcatcatgcgcacgtaggagttggcattcagcccctcggccaccgagttcagcagcatgttgccgaacgccttgatctcgtcggtgctgccggtagacgagccgcaggccacgcccatgcgcccgtccttgatggattcatcgccgagcaaaccggcgtcctgcaacgcctgttccgctgcccacaccgccaggcgcgaaacccggcccatgctgcgcaattgtttgcgcgtccaatgggcgggcacgacgaagtcgtcgatcggcccggccaggcgcgtgttcagttccgtaaagcggtcccactcgtccatacgccggatgccgctgcggttggcgcggaagttggccgaaatggttgcccaatcgctgcccagggaggtcatgccggccatgccggtgacgacaacgcgcttcatcagcacaaacctccattcacggccaggacctggcgcgtgatatagccggcttcggccgacatcaggaagttcaccgcaccagccacctcttccggcgtacccatgcgctgcgccgggatcattttcatcagctcttccaccggcacgttttcatccagcatcgccgtgtcgatcaagccgggagcgacgcagttgacggtgatcttgcgcttgcccagctcgatggccagggccttggccgcgccaatcagaccggctttggacgcgctgtagttgacctggccacggttaccgatcaaaccggaaaccgacgtgatgcacacgatacgcccagccgcgcgacgacgaatcatcggcatcatcaccgggtgcagcacgttgtagaaaccgtctaggttggtgcgcatcaccacgtcccagtcatcttccgacagggccgggaacgcgccgtcacgggtcaggccggcattgagcaccacgccgtaataggcgccgtgttgctccacatcggcctcgagaatttgcttgcacagcgcacgatccgccacgtcgaactgcagcacccgcgccttgcggcccagggcttcaacctcggcccgcaccgcatcggcctcggcgcgaccgctgcggcagtgcagcacgaggtcatggccggcctgggccaggcgcagtgcaatggcgcggccgatgccacggctggagccggtgaccagtacggattcagtcatggcgttacgtccttcgattcatctaaataattggccgcctggggcggtcgaaatacattcaagcgggcgctcgcctggataccgtcagcggtcaggtggcattcgaacacacccatcccattgtcgtcttccagtgaacgcaggccgtggatgctcagctcggcgcctgccggaaagtgctccacgttgcactcgaacttgcgcgtgccaagcaggaagcccagtgccaccgcttcgcctttctggcgcgcgtggcaaccggcgtaggcggcgacgctctgcgccatcaattcgatgccgacccaggccggcaggctgccgtcagcgcggttgaacaggccgcctggcttgaccgtggtgcgagtgtggatctgctcttcgtcgaacgacagcacctggtcgatcaggatcatgtcgcccgcatggggcagcagttcggcgagtggccaatcgatcatggggcctctccaataatcaggctgacattgttaccgccgaaggcaaacgagttgctcatcaggcagcgtttttccagggcctctgtggcttgcgcccagtgcaaggcgggcagtgccgggtcggcctggccgtcccagacatgcggtggcacccggtggtggaccaggctcaaccagcagaacgccgcttccagcgcaccggcagcacccagggtatgcccgctcatgggtttggtcgatgagcaaggcacgccgtgggggaacaggctggcgacggccaggctttccatcgcatcgttatgctgggtggcggtgccgtgcaggttcaggtagccgatctgctcgggctgcaatttcgcgctggtcagggccttgcgcatcgcctgcaacgcacctttgccggtgggttcgggcgcggagatatggtgtgcatcgcaactggcgccgctgcccagcagggcgatgggtgcgggcgccttgctcatcaggaacagcaccgctgcttcgccaatgttgatgccgttgcggttcaccgaaaacggattgcaacgctggttcgacaccgcttccaaggcactgaatccgttgagcgtgagcttgcacaggctgtcgacgccgccgcagatcaccgcgtcgcacatgcccaggtccagcaggcgctgggcgctcatcagtgcgcgggcgctggaggtgcaggcggtggagatcacataggccgggccgctcagttgaagccagtcggcgaggaaattcgccggggcgctgagttcctgctgctggtagtcgtagtcgccagggaactggtgttcgcgcaggtaatgggcaataccgcgactggcttcatcaatacccgaggtgctggtgccgagcacgatgccgacccgcgatgcgccgtagatgcggatcgcctggcggatctcgccctcgatctgcaacgctgcctccagcagcaactggttattgcggctgctctgctggcccaactcggtgggtatggttgccagctcgccgtgcacaccggccaccggcagcacacgttccgggacccagccgctttcggcgcgcatgccggagcagtcaccggcaaacaggcggcggctgacctcggcctggccacggccgagggcgcagatcacgccgagtgcgttgaggtaggcgctcatcgtgccgttcctagcggcgtgatgcggtagctcaagggctggccggtcatgttcacgctgaacacctcggacgactggtacacgatctgccaatggcccggcagcgtacgcgtcaaatccatcgcctgcgcgctggggtacagcgcacgcacgtcatccgccgaggtcagtgcaaacaacagcgcggcgaacagctcgcgtgcctggggattgggcggcagcaagccatcggcctgccactcgccatcgatcaacttttgccgggcctgggggatgcccagcgggtccatcatagaccagcgaatgccgctgccttcgcgctggatcaccagcagccagtcctggctctggccgtcagccaggcgttgcacatgcagttgcagcggcaaggccagggccgggattttcgcgggcaacggcgcctggctggcgcaggcccccagcagcaacaggcaaccgatcaacagccagcgcatcatgacgcggtactcgccaaaggcttgcgtgccacgcagttgaccaacgtttcttcgcgctggcccaccggcggtgccttgcgcagcccccagcgttccagcaggccgaagtcactggcgcggctccaccacaggtatgggtacgaaacgttttgcgggccaaactcaaagccttgttcgcggagcatctccaggtattcttcggcgcttttctgcacatgcatcgggtggcggaacagccagcggatcacccaggtatcgatataggcttcggtggactcggcaaacagcaagtaaccgcccggcttgagcacgcggtagaactccttgagtgcgcgatgctgctcaaccaggtgatggaaggtctggtggcagaacaggatgtccacgctgtcgtccggcacctgcagggtggcgcagtcactgccgatcagctcgatggccaagccttggcgcgccgcttcttcacggctcagttccaggctgtgcgggtccgcatccaggccgatcaggcgcgcaggggcgaatacctgctgcaacagcttgaaggatttgccctggccgcaaccggcgtccagcagcaccggtgcctggggcagcggctcggtgaacaggccgcgcaggtcattgatcgctacgcgcaacacatggtgctgccaggtgtggctgcgcaggaaccagaagccgaaccgggtttcctcgacgtagttcttactcaaatactgactgctcacgcggcatcccctgcacaaatttccgacaacatccgcaagcgtcgcttgggctcactcacaaacgggttgcgctcatcccacgcatagccggcgaggatcgacgcgatcatccggcgaatctccggcgagctgcccggatggaagatcacatcctggaacgtcccggcgtaccagccttcgacgtagcaacggaaggtatcgacaccgcgcttcaacggttcggcaaattcggtctgccagtcgacggtttcgccgttgagctgacgatgcagcacgccggctgccatgctcgccgaacgcatggcgatggtcacacccgaagagaacaccgggtcgaggaattccgctgcgttacccagcaaagcgaagcccggaccgtgcagggctttgacgttggccgcatagccgccgatggtccgcgccggcgtatcccagacggcgttttgcagcacgccggacaggctcggcgtttcatcgataaagccgcgcaggcaggcgtcgaggtcagcatcgcgaccgtcaaaatgcggcttggcggcgaccacgcccaccgagcagcggccgttgctgaacgggatggtccagaaccagatatcacgctgggtcgggtgtgtggtcaccaggatcttggtgcggtcgaagcccgggtgttcgatgcgatcttcgatgtgggtgaacaccgcctggcgcaccggaaagtccgacggcagatccagctccagcaggcgcggcaatacccggccgtagccgctggcatcgagcacaaacttagccttgaggtggtactcgctgccgttctcccggcgtacatgcaggtagcgcgactcgcccttgaagtccacgccgacgatggtttcgccgtagcggatatccacgccttgcttggcggcctgatcggccagcaacttgtcgaactcgccgcgctgcacctggaaggtggtcggtttgccgttgctgaaggtgtcgccgaaatcaaacgcgctgtagcgctcgccccacgcaaatgcggcgccggtcttcacctggaagcccgccgcctgcacggcgtcgagcatgccggcttcttcgatgaagtcgatgcagtgcgacagcaggctttcgccaatcgagaaccgtgggaaatgctggcgctcgatgatcaatacatcatgccctttgcgctttaacagcgcggcggcgatggccccggatggaccggcaccgatcaccaccacctggcgacgttccatttcaactgtgggcacgagggctccttgccacattggcgataatcacattcataaggcgtgcttctgtcgcccggcccagggcgccagcataaagctgaaggccaggcccaggctgactgataagccgaaattgctcaccgctggtgtactggacaccgccagcaggccaaacgacaaccaggtcgtcaacgctgccaacaaggtccccaagagactgaccgcaggaccgccgatttgctcgcgcatcaggatcgcgtagtcgacgctgatggccgtgaccagcagcaggccgaacaggctgaacagcgtcagcggctggcccagccagccgaggctggccaggctgcacagcgccgccagcaacggcagggcgacgatacgcaaggcaccgccgaagccgaacggcaggatcagcagcagcacgatcaatacgcaggacatcaacttcaattccgcggcgctgatctgggtgtcggcaaacactcggttcaagtcgcccaggcggtcgactaactgcacgccgggcagatccagcgcttgcacacgcagcagcgcggggttgttcaagccttgcaggctgaccatcgccgccacgccgccgtccgccggcccgagccacagcgtgcgccaaggttcggccagcgggcctttcagcgcggcgtcgatgtcttgtgtaggcagtgcttgcaactgggtgacttcggcttgcagggcactggcgggtacgccgaggtccagcagtggttgccagtgttgcggcagtgcgttcagcgcatcgcgcacttgttgctgttcggcgggcaggctgaccaactgattgagcgccagatagccctggagcttgtccatgttcaccaactgatcaaggcgttggcccagtgcgcgttgacgctccaacagttgctgctggttatctgcacgcaccaggaagaactggctggtaggctggaaaccggtgatgcgcgccacggcctgggcttcttgcagcaattgtggcggtgcgccgatccactggcggatatcgttcttgctgttcaagtgccacaggccaccgacgcaaaacagcagcaccagcgccagcaatgccgggctcggcacgcgcttgagcaacgactcgcgcaccagccacaggcattgcgcgacgcgcagcggccattgcgccgggcgcagttcgacgcccttgagcagcgctggcagcaggcacacggcggacaggtacgcaccgaccagacccgccgcggagaataccgcaatctgggtcagcgccgggaacggcgtccaggccagcgccaggtagccgatgcaactggtggccaggctcaggctcaagcccggcaaggtgatgcgcagcgccggccagctgcgccaggggctcatgctccagctcttcgacaggtaatgcagcgggtaatccaccgccacgccgatcaggctggagcccagcaccagcgtcatcacatgcatatggccgaacagcgccacacaggccaccgcgccaaacagcatacccaccagcaccggcacaaacgctagcaacacgcgccagcggcggaaggcgagcagcagcaacaacaggatgccgacggtagcgccgccgccgacccaggtgatctcccgcgtggcttgctgctgaccattggcggcgtacaacaaaccgctggcggcgagcaactgcgcgccttgctgaccggcttgcgcgcggctcgcctggagcaggtccgccacttgcagcggcagtttcatgtcgaaggcattgccggtggtgcgtgcccgcagcagcacccagcttttgccgtcggcatcggcgatcagcgcaccgctgccgatatccagctgcaccgaaccgtgttgcggctggctgttctggatacgtccggtcaggcccagccagtcatcctggctcggcaccaggctgaacccggtgaaagggtcgaacagcgcctgtacgcgttgctggacaaacgcatcgggatgctcgatcagttgctcgcggtccttggccgacagcatcgccaggcggccgcgcagcaattgctcacgcagcgccggcaagtcggcttgcaggttccattgcaccttctcaaacagcccgctggcctgccagcgctcgcccaactgttgcgccacggcgacggcttgctggcggtcggcatgccccaccagcaccagcatttcgcggttcagcggttcttgcatgcgttgttcggcttgctgttccagtgcatccggggtgttgcccggcaccagttccatcaggttggccgacagcggcgcgccgtgacgccattgccagccggccagggccagcacggccgccagcaggatcaggaacaggcgcggcagcaggcgctcactgggcaaagtcgtgttgctccgcgtcgctcaagggctgggctgcggtgctgtcctgcatgcgcagcacggtgctgtcgccctgggtttccagcagctcgattttttgcaccaactcgccaccgtcgatattgatctgggtgaagacttgttttaacagcagcgagcgtgggatcaacgtcagcttccagtcgttggcttcgcctttcaattgcagttcgaagtctcgctgcaaaccactgctgtcgccctgcagtacggcgaggaacagccgattttgctcggcaccggcgctcttgttcggcagcagttgccagccattggcatcgcgacgggcaatgccctgggcgctgatgcggtagtcctgttgtagtggggttttcagcagccacagcaggccatggtccttggcgagcacgaaggtgcctttgctgaccaatggctggggcagggcgcgcaggtgtttttcctgggtaaagttgccgtggatcaccgagggtttggccagttggtcgctgagttgctgcaaatcgaaagcgtgggcactgaaactcaggaacaacccgatcaaaaatgtgggagcgggcttgcccgcgatgagcctgagggcgctgcgtagtgtccggcggatcgcgttatcgttgaagtccatcgggggcaagccccctcccacatgggatttcatttcagggccctttcgacggcgtcggtgaagactttgggggaggccaactgcatctcgcggctggcaatctcaactgccacctgcacggtgctggcgcgggtcaaacgctcgccgctggccaaatcggtgatcaggtaattgaccttcaagcggttctcccactccaccaggctggcgcgtacgttgatggtctggccgaacacggcgccgcgcacgtagcgcagttgcaggtcgatcaccggccaggcgtagcccgattcgagcatcgccgtgtagttgtggccgagcttgtccagcaacgcgcaacgcgccacttcaaggtacttcacgtaatgcccgtgccacacgacgttcatggtgtcgacgtcaaaaaacggcacgaggatttcagtgtcgcaatgcaatacgccctggctacgcatgcagcctccaatgttgttcggcgatgcgttgcaggcacaggcgcagttcgccttccagggcgcggtcttcgatgaccggtgggaagtccttggccagctcttcatgcatcgccgccaaggcgggtggcagcggccgtgcatcctcggcctgggcccgcagccacacgccctggtttgcggcgagcagggtggcggcggcgacttgttcggtcagctccagcacgcggatcgcatcgcgggcggcgatggtgcccatgctgaccttgtcctggttgtggcactcggtggagcgcgagaacacgctggcgggcatggtgtttttcagggcttcggcggtccaggcgctggtgccgatctgcaccgccttgaagccgtggttgatcatggcgcgatcagccggcgcgccggacaggttgctcggcaggccgtggttgtaacgcacgtccaccagcagcgcgagctggcggtcgagcaggtcagcgacgttggccaccagggtcttgaggctgtccatggcgaaggcaatgtgcccgccgtagaagtgtccgccgtgcagcacgcgttcttcttcggcgtcgatgatcgggttgtcgttggcgctgttcagctcgatctcgatgaacgagcgcagccagttcaggctgtcggccagcacaccgaggacgtggggtgcgcaacgcagcgagtagcggtcttgcaggcgatgcagcggcgcggtgggcgcatcgatggccaggtccttgcgcagccaggcggcgacttgcatctgccccgggtgcggcttggcggcgaacaggcgctcgtcgaagtgttccgggttgccttgcagcgccaccacgttcaacgcggtgatgcgcgtggccagttgcagcaggtagtcggcgcgggcgaaggccaggcatgccaggccggtcatcacggcggtgccgttcatcagcgccagggcttccttggggcgcagcaccagcgggtcccagcccagttcgcggtgcacgtcggcggcctggcggcgctcgccacggaacatcacttcgcgttcaccggacagggttgcggccacgtaggacagcggcgtcaggtcgccgctggcgccgaccgagccttcttccgggatcagcggcagcacgtcgtgttcgaggaacgcgtgcaggcgctccagcaactctacgcgcacaccggacacgccgtggcacagcgactgcaaacgtgcggccagcaccgctcgggtggcctgggcgtcgagcagcttgcccaggccgcaaccgtggaaggtatacagatgacgcggcagcgcctcgacgtgctgcaagggcacggccaccacgcacgaatcgccgtagccggtggtcacgccgtagatcacgccttccttgtccagcagcgagtcgaggaactgcgcgcccttggcgatgcgctggcgataggcggcgtcatcctgcaactgcgtaggcgcctgacggttggccagggccagcacgtcttcgatgcgcaaagggcgttcgccaaaggttaccggctcaagatgcgtggtcatcggtcttccagaaagggtaaaagttgaaccattgttggggcgcttccaggcagaactggcccaggcgtgcggcgtagcgcgcggtccacagggctatgacctgctcgcgggtggtgcgtttccattcgatcaacggcgtaaacggctcgatgctcaggcgataacggctgccgtgcttgaggcacatcaacaggttcaccgggcatttgagcaggccggccagcagccacgggccttgggggaaggcggcgtcatggccgaggaagtccacacgcaccgtgcgcccgccgtgcagcggtacgcggtcgccggcaatggccagccactcgccatcgtccaggcgctggctgagcagcagcatggtggccgggtccagctcgctgacctggatcaggcgcaagtgcgtagccccggcctcgcccaacaggcggttgaattgttcggcgtgcttggtgtgcaccagcacgttcatggtgacttgctcaccgatctcggccagcgcgcggcacacttcgaggttgcccaggtgcgcgcccaccagcatctgcccgcgctcactgcgcagttgcccgcgcaattgcgccgggtcgttgatttcgatctgctccagacgcagcttgccgttccacacgtcgagcttgtcgagcaaggcgtcggcaaaggccatgaactggccgaagactttccagtggctggggcgcagttcgtcacgcccgctccagtcggccaggcgctgctggtactgccaggcgctctggcgcgcggtccggccgaacaggaagaagtacaggacgatgccgtacagcaccgggctcagcagtcgacgaccaaggaccttggcggcgaaggcggtgagtttcatcagccaatagctgccgcgttcctcgcggtcggcccagtgtttgctgctgtcgctcatgcctgccaccgtcgccacaggatcatcggtgcgcggatcagcatgccgaagaacaaccgggtgtgcatggccgagatgcgtacgttgtcgcggaacaggcggaagtgcgacagtccatcggccgggtaatgcacctgggtcggcagccagcgcatcggctggttgcgccaggccaggcgcaccaggatgtcggagtcgaagtccatgcgcgtgccgatgtaggccgagttcatcagcgccagcaccggtgccagcgggtacacgcgaaagccgcacatcgagtcgcggatctgcaacgacagggtgttgatccacacccacacgtgggtcaggtagcgcgcatacaaacggcccttgggcacgctgtcgtcgtattccgggtagccgcagatgattgcatcggggtgccggcgcgaggtgtcgataaaggtctcgacttcgcgcaggtcgtgctggccgtcggcgtcgacttgcagggcatggctgaaacccaggcgtgcggcttcgcggaagccggccatcactgcgccgcctttgccctggttgttgggcagggtcagcagggtgacgttttccagggtcgccagttgcgccaatacagccgcgcacgccgggctgctgccgtcatccaccagcaggcagggcaggccgctgtccagcaggctgcggaccacggccggtacggcggcttcgtggttgtagaccgggatcagggcgcaggggttatgcattggatgccaccaactgaatgcgtccgctggagcaggccgctacgccgttgcgataggcgaaatacaatttgccgcgttccgggtcaaagcgcaggtgcagttcgatcccgtcgcctgggcgcaccagttgctgaaacttgagcacttccatacccgcaaaactcggtggcaaatcgagcagttgctggcccaggttgaacgcccactcgacctgcaccacgcccggcagcaccggcgtgaccgggaagtggccgctgaagtaggccagatctggcggtacgctcagttgcacggtccattcgccattggcttcgacgcgctccaagacttccggtgccttgggccggggtgccagcaacagtgcctcgatgtcggcctgaggcagtttgccttggctgttcagcggtagctgtctcagtaaccgccaacgacgcggcagcgccagggcttcgcagtgctggctgaggtgttggcgcaaggtttgggtgacggttcggcggccttgattgcgcaacgcatgcaggccttcagcgctcaacaccaccagcgcaccgagtgaagcgcgattttcctggactacgcccagacgggtttcggcgacccacgggtgggccatcagcgcgtgttccagcatgggcagggaaatgcgtttttcttccagcttgacgatgcggtccaggcggccgagcagctcgaaacggccatcggcatggatgcgtgcggcgtcggcggtttgttcgacatgcccctcaggcaggtatggcgatgcaatgcgcagggcgccgtcggcatcttggctcagttgcacgtccgcaaacggctgccaaggctgtgcgccttggcgccaggcgatgccgccggtttccgagctgccgagaatctcggtcggccactgttgcaagcggtcgtacaggctgccggcggcgtccaccggcaatgcgccgccggacgaaaacacccgcgacacctggctcagcgccggccagtcgaggttatcgcccatgcgcttgagcagtgccgggctggcaacccaggcaaagtgcgcgtgctcgcggctggcgcgctgcatgtcttcagggaatgccagttgcctgcgcacaaaggtacggccggcgcacagcggccagagtacgcggaacagcaaaccgtagatgtgttgggtggcgacgctgccgatgatgcaggcgtccttgaggtcctggccccacagggtttccagggcctcgacctcgttggccagttggcgcagggtcttgtcgatgcgcttgggttcgccgctggagccggaggtgcacaggctcaggtggcaagtgtccaagtcaagtgcggcagcgctcagtggcgccgcatacagcgactcaaggtcaaccgcttcggtcagccaggcatcgacggcctcatcccagcgttggcgggtctgaggttgcaggtcggcgggcagcagtacgctgaccccggcccgccaggcacccagcagggcaatcgccagcaggcccgcgtcttcaaggtacacggccaggcgctggataccacgcgcttgcaggcctgcggccaggctcagggagtctgcccacagctgggcgtgattcatggcaggttcggtggtgaccggacgctgttccagcggctcaagcagcacgtgctcaagtttcaacccattcatacgcggcctcgaaccctttgtcgtaccagccattccacggcaaacaacagccccatcagcccgtaggcgatcaggccgttgtacaacgtccaccagctcagcggcgcccacagggtgagggcggcggcgagcaggccattacacagaaaaaatacactccacaccacggtgacctggcgggtatacacgatggcgtggggcggcaacaccgggtcggtcatgcgcgccaggcgctcgaccatcggcgggccatatttgaggctcaggccgaacaacgccaacatgaacccactgaccaggctcgggtaccagcgcagcaagtgcgggttgtcgaaccaggccagcaacaggcagaacacgatcaccgccagcgccatccagcggctgccggggcgtcgtgcaccggtcagcgcgcgcagcagccacaggccacccagcaacaggccgaactgccacggtgcgaagtgttcggtgccgtaatacaccgcgaaggggtacagcagccccgccagcaacaggccaaggccgatcagccggctcatgcggcaggcgtgaccagacggtacaccgcctcaaccacgtcgttcacggtgcgcacagccttgaattcctcggcggcgatcttcttgccggtctggcgcttgatatggtcgatcaagtcgacggcgtcgatgctgtcgatttccaggtcctggtacaggttggcgtcgagggtgacgcgttccggcggcagttcaaacagttccaccaaggcatcgcgcagggtgttgaaaatatcgtcacgagtttgcatggtccggtctcaagctgcctgtctggccgtgacgaacgccgcaaggctggccacgttggtgaagtgattgcgggtgtccttggcatcggcatcgatcttgatgccgtactttttctggatcgccaggcccagttccagggcgtctaccgaatccaggccgaggccttcgccgaacagggtctgctcgctgccgatgtcgtcgacgctgatgtcttccaggcccagggcctcgatgatcagcgcctttatgtcgtgctcaaggcggtgttggtcgctcatcttcggcgagctccttaataaaatagtgatgcaggtaatcgttgagcttgcgtgaggcctggggcgctggccccagtgttgcgaacgcctgtggttctatatcggcacccacccgcaaactgaagtgcacgcggcatttcgggatgcgataccagggttcggccttggtcagcgtggtcgggctgaccttgatcaccacgggggtgatgattgtcgcaccccgcagtgcaatggcggcaccgccgcgatgaaaggcaggcgccgcgccgggtgtggtgcgggtgccctcgggaaagatgatcagggtctggccactgcgcagggcgtctgcggcggcatcgagcatctcggcactgccgtcgttgctgatataaccggcgtcgcgcaccgggccgcgggtgaacgggttctgccacaggctctgcttgaccacgcaattggcctggcgcaccaggccgatcaggaacaccacatcgatcagcgacgggtggttggcgatgatcatctggccagggcggccgagtttttcggcgccttcgacgctgtaggtcagcacgccggcgcgttgcatcaggcggataaagaaccagaacagccaactgatcgtgtggcgggctcggctgcggtgtcttgcagcgctgcctggcaggcaactgagcaacggaaacaccagcaaacgcaggcacagcccgccgaagccgaacagcgcaaagctggcggcggtggcgaacagacgccagtaataggcgtcccgtggtttgtcattcagggcttgcgttgccagttccatacgcggttcttccaggcatgttggcaggcgacctgttcggtgagcagggtgcgcagcaggttcagggcgtggggccactgggtttgagtgtgttggacagtgccgctgttcagttccaactgccactcgtcgcccggcgtcagcagcagaccgagggcgtatgggaagggtacgtcaacgatccagctggcataggcttcgggcggctgctcctcggtaatcaccagtaaaaccgctggcgcgccctcgttgagcagcgcggcggcttcgagcatgccgtgctccaggccatcgccggcggcggcgagggcggtcatttcgctggtttcattgcgcaggatcgaccaaaggccaattaccgcgttgtgcaccgacaggctgaactgggtcggcgacagcggctgctcgctggccaggtcgctgaggatgtcgagggtgcgcggggtctcgccatgccgggaaataaacaccagcggcaggtcctgcaggccttcggccaacggccaacccacgctgaacgccatgcgtgccagcctgctcaggcggcggcgctgcatggccggcaggaacgagacgtcaggggctgcatcacttgcgggcagcaacgccggcgcctgacaccaggcgcgccagtcgtccacgctatcgagcccgggggcccaggcgcgccattgggcgatgttgaaagtgatcactgagaagttatcccgcccctgcgggcttccatgtgcggctgttggccccgaataccgggacagggaacaatagccgaatggcgcgcattatcccggtgccgtggggttctagcaaactttggtaaagatttgtgcacggtcgattacaaaatagtggaaagaatttacagattgtcctttacccaggggctggctggattgtcggaccgttctttttaatctgtgggctgtgtatgacagtcatcgcgccaatggcatggtgatgcagcagtgcatggattaacgaggtagctaacaggcgcttttgccctctacactcggacattcattgatacacggaggtttttccatgcggcgtgtggtgttcaatcaaaaaggcggcgttggcaagtccagcatcgcctgcaacctggcggcagtcagcgccagcgaaggttatcgaaccctgttggtggacctcgatgcgcaagccaactcaacccaatacctcactgggttgaccggcgacgatatacccatgggcattgccgaattcttcaagcaaaccctgtcttccgggccgttttcgaagaaaaaccgggtggatatctacgagacgcccttcgacaacctgcacgtgatcaccgcaaccgcagaactggcggacctgcagcccaagctcgaagccaagcacaagatcaacaagctgcgaaagctgctggatgagctgagcgaagattacgaccggatttacctggatacgcctccagcactgaatttttatgcggtttcggcgctgattgccgctgatcgcgtgttgatccccttcgattgcgacagcttctcgcgccaggcgttgtatggcctgctggctgaaatcgaagagctgaaggaagaccacaacgaagggttggaagtggaaggcatcgtggtcaaccagttccaggcccgggcgagcctgccgcagcagatgctggatgagctgattgcagaaggcttgccggtattgccggtgtacctggccagttccgtgcgcatgcgcgagtcgcaccaggagagcaagccgctgatccacctggacccacggcacaagctgacgcagcagtttgtagagttgcataacctgctggaaaacgcgtaacgaagattcaatgtgggagggggcttgcccccgatgacggagagccggtcgacacctatgtgactgatacaccgctatcgggggcaagccccctnnnnnnnnnnnnnnnnnnnnnnnnnnnnnnnnnnnnnnnnnnnnnnnnnnnnnnnnnnnnnnnnnnnnnnnnnnnnnnnnnnnnnnnnnnnnnnnnnnnnnnnnnnnnnnnnnnnnnnnnnnnnnnnnnnnnnnnnnnnnnnnnnnnnnnnnnnnnnnnnnnnnnnnnnnnnnnnnnnnnnnnnnnnnnnnnnnnnnnnnnnnnnnnnnnnngccaactgcccagccgcctgttcgaacaccggtgcaaacgatttacacggcccacaccagtcggcccatacatccaccagcaacggcaggtcgcctttgatctggctggcgtagtcgccttgtttcnnnnnnnnnnnnnnnnnnnnnnnnnnnnnnnnnnnnnnnnnnnnnnnnnnnnnnnnnnnnnnnnnnnnnnnnnnnnnnnnnnnnnnnnnnnnnnnnnnnnnnnnnnnnnnnnnnnnnnnnnnnnnnnnnnnnnnnnnnnnnnnnnnnnnnnnnnnnnnnnnnnnnnnnnnnnnnnnnnnnnnnnnnnnnnnnnnnnnnnnnnnnnnnnnnnnnnnnnnnnnnccccgcgttgggctgcgtcgcagcccccaagatggttgcgcgatttcgggtgactaatcagggccgcttcgcgccccaacgcggggcaaggccgctcgccacaatggagggcatcgttcttacgatcttaggaagaacaactaatctccaaatgctttccccaatccggcggccgctgtgcgtattgctccatccccgcttgctcctcaaacggcctggaaagcacttcatgcagccgtcgcacctcgctgtaatccccagattcggcggcaacgatggcgttctgcgccaggtagttgcgcaggatatacagcgggttcaccgcatgcatccgcgctcggcgctgttcttcgctgtattccccatcccgctcaacgcgcgccttgtactgctcggcccaggcatcaaacccggccaggtcgacaaagtcatcgcgcaaccgtgccacggccaacgccgccgactcatcccccaggcggcggaagaacagcgtgtaatccacgccgctgttctgcatcagcttcaacaaccgctcgaccagctgctggtcatcgtcttcggcggtggtcagccccaggcggcggcgcatcaggtccaggtagttcgcctggtacagcggcagatacagccccagtgcttccttcaatgcatcgacgctgataaacggtgtcagcgcctgggccaatgcactcaagttccactgcccgatcggcacctgattgctgaaggaatagcgcccttcgtgatccgagtggttgcaaatgaagtgcgcgtcaaagtcgtccaggaacgcaaacggcccgaagtcgaaggtgatgcccaggatcgacatgttgtcggtgttcatcaccccatggcagaagccgtaagcctgccatttggcgatcagctcggcattgcgctcgacgatttggcggaacatcgccaggtacggctcgggctgttcgcggcactcggggtagtgcaggttcaatacgtgctcggccagttgcgcctgctgctcgggcttcttggtgtagtagaaatactcgaaatgcccgaagcggatatggctgggcgccatgcgcaacaccatcgcgccgcgttcctgtttttcgcgccacaccggggtgtcggaaccgatcacgcacagcgcgcggctgctggggatgcccagcgcgtgcagtgcttcggacgccagaaactcgcggatcgacgagcgcaacaccgcgcggccatcacccatgcgtgagtaaggcgtcatgccggcgcccttgaggtgcaggtcccaatgctcacctgcctggttgtacacctcgcccagcagcaacccacggccatcgcccagttgcggggtgtaaccgccgaactgatgcccggaatagaccatcgcccgcggctctgcctcggcccacagtttgtgcccgccgaacagttcggcgaacaccggtgtttcggcaacggcggggtccaggtcgagcagggccatggcggcctcgctcgccacgaccaggcgcggtacgtcgaggggctcgggcaatacgtgagttgagaacgcatcgcccaggcgtgcgaagcgattgtcgaaggtcagttcgtcgagggctttcaccggccatctccagcagaatgtccgagcattctgctggggatagcgcggttagtcgagtttgctcggcggtggttcctgcacgccgccgtcgttggcgggcttggccggggtgtcgacttccaccagtttgtattcctggccgtggaggttcttgagatagacctccatctggcggaacgagatgttgatgtgctctttcttgaactcgcgattgataaagcggttcacttcgtcgatcaccgggttgcggtcgcccaggtcgcgcacgtgcatgcgcagctcgtggtcgagggtgctttcgccgaagttgaggaagtacacatggggctccgggtccttgagtacccgggggttgtcgcgggcggccttgagcagcagttccttcacgcggtccaggtcggagccgtagtccacaccgagcttgagggtgacgcgggtgatggtgtcggtcagcgaccagttgatcaactggccggtgatgaaggttttgttcgggacaatgatgtccttgcggtcaaagtcggtgatcgtggtggcgcggatgcggatcttgctcaccgtgcccgacaggttgccgatggtgatggtgtcgccgatgcgcaccgggcgttcgaacaggatcatgatgccggagatgaagttggcgaagatctcctgcataccaaagcccaagcccaccgacagcgccgccaccagccattgcaacttgtcccagctcacgccgagggtcgacagggtggagacgaaaccgacgccggcaattacataggacagcagcgtggtggtcgcgtaggcgctgccctgggccaggtccagtttggacagcaccaatacttcgagcaaacccggcaagttgcgcgcgagcgcgaaggtgatgccgatgatgatcagcgcgccgagcaagtcgccgatgctgataggcaccatgctgatattggccccggtgccgctggtgtattcgtacagcgtgacgttatccaggtaggaaaataccgagatcaggtccgaccacacccaatacagcgcggcgataaagccaccgagcaaggccaggcgtatcaggcgcatggactgctcgttgacctgctcgatgtccagggtcggttcttcgatcaccgcttcgccgtcaccggcttccttggcggcctggcgtttggccagggctcgcgcataggccaggcgccgggcggcaacgcccaggccacggacgaaggtggcttcgatcaccagccagaacatcagcaggtacagggtgttgatcagccggtcgctgagcttgagtgcggtgtagtagtagccgaagcacacagcgatgaacaatgcgatgggcaacgcagtgaacagcaggcccacggctttgcggaacagcgaggctttttcatgggtcgggctgtgcaacagcaggcggcccagcagccaggccatcagcgcgtagcaggtcagcaccacgccgatgcccagcacatcgtcagccagcgccgccggttggtgctcggcaatcgccaccacggccaccagtgccagtaccaccagcccgagtttgcgcacccagccttgcaggaattcgacctggggtttctcccagcggaagtgcagttcagccacgccacccggcgccaggatgcgataggcggtgtagaacaccagccaggcctgggcgatctgcagcagggccgaaccgaggttggcgttttgcccacgggcgtcgatttgcagcgcgtagccgcacagcgccaggccgagggacaccggcattgccagcaggatgttgatcaggatggcctggggcgtgtgccactggctgtcgcgcttgaagtggccgatgtccaggtgcaccttgctcaagcgttgatacagatttttacgccgccacagcaacgcgccgatcaacagcagcaacggcaggaacagcaacgggcgctgggtcaggccgtcatacagctcgctgacgctggaggcccagggcagggtggcaacttgcttgctcaggtgcgcgggaacggtttccagccattcggtatccagcggcttgttgctgggaatccagaacatctgctcatccagcgtcgcccgcagggtggtggcggtgctgagcagttgtttctggttcagttgcagggtgatggattcgttgagcagcgcgctcagctcacggctcaggcgctccagcaggtcgctgcgggtgatcgccagttccagcagggtgcggcgcagttgcggggtgacgtcttccggcgcctggttggccagcaggttatccacataggcgctgggcgagctgatcagctcgcgctgttggttgacctcgaactggtacaggcgaatgttggcgatgtcgtccgccaggtcgcggtccacggtgaggcgcggcagggcctgcttttgcttgtagaggatcttcgacagcagcaggctgcccttgagcacgttgatctgctcgtccagggccgagtcgctctgggtcacggtgtccagttgctgcttggtctgcaagttcttctgggtcaggtcgttgaggcggtcggtacttttgagcaggtagtcggacagcttcaggttcgccgcgctttccgtggccagcaggctgctgccaccggccttttgcgcttcgatggactgctgggtcacggtctgctgggactgggccaggcgtttctggttgatcagggtttgcaggtcctggatctcttgttccaggcgcgcggtcttttccatcaccagatcgtgctggctgttgcccaggtcttgcagttggctgttgccggccagttcctggcggcgcagggggatcagcgcattgagcgccgcgagttcagcgttgagctggttacgctggtcggcgctgagggtcttgccgttgtctttgccggccttgagcgtcgaattgatctgcaggatgcgcgtctggctgttgctgatttcggtctgggcgcgctcaggacgggtctgggcggcgatggacaggctgttggcgtccgccagttccttttgcaggtcgccttgctgggtgctgcgctgcaccagcaattgctcaagctgcggcaccggcaggctggcgtagcgctgggcgaccgggatgactttggtggccttgagccgggccagttcgcgctggttgtcggcggtctcgcgcggggcgtcttccagttggcgcttgaggtcgaccaggcgctgctcgtaatcctgcttgttgcccaggtatgtcagggtctgctgcaggatggtctgcaacgccttcatgtcggcgtcgggcagcttgcggtcgggcagcttgtccagggtttgctggatagactcggcgctgggcgggtcggcggcgtggacgacgctgacacacagggtcaggctcagcagggcagtggcgagaagagtgcgcaaggttggcatagagaccggtcgtgcaaggtgaagaatcgggggcgtcgtcgccccgcagtttagaggaagagtccggggcccgggcgacttccttcggggaatctgacgcccactttgccgatcttgttcccgtccatgaccgcgacggtccagatggtgttgttccactccacctggtcgccgacgatgggcgcgcccccgactttctgggtgatgaagctgctcagcggcatgtccgggtcgataccctccagcttcaggccgtacagggccgacactgcgcccaattgggcgtcgccttccagcacgaagtcgccgaagaagcgcaaatccagaccgcgttgcggcgcctggctgaacagtttgcctagggccggcaggttgtgttcgtggccgatcacgcagagtaaatcgccgacttccagcacggtactacccgacggatggagcagttgctggccacggaacagcgcggcaatccgcgtgccttcgggcattttcagctcgcgcagggcggcgccgatgcaccatttttccgcgcccaggcggtagacgaacagctcccactcgctggtgacgtgcacttccagggctgcacgggaaatcggcgccgggtccggcgggacggtgaccttgagcagcttggccacccacggcaggctcgtgccctgcaccagcagcgacaccagcacgataaagaacgccaggttgaagtacagctgcgcatggggcaggccggccatcagcgggaacaccgccagaatgatcggtaccgcgccgcgcaaacccacccaggcgataaaggctttttcgcggccatggaacgccttgaagggcagcaggccgaccatcaccgacagcggccgtgcaaacaggatcatccacagcgccaggcccagggccggcagggcaatcggcaacaagtcatggggcgtgaccagcaggcccagcaccaggaacatgccgatctgcgccagccaggccatgccatcgagcatatgcaaaatgccatgacggctgcgcaccgggcggttgccgatcaccaggccgcacaggtacacggcgaggaagccgctgccgtgcagggcgttggtcacggcaaatacgaacaggccgccggcgatcaccaggatcggatacaggccggtggccagattgatgcggttgaccatttgcagcatcaaccagccgccgcccaggccgacgatgccaccgatgccgaattcgcgcaccaggtgggtcagcaggctccagtgcaggccggtctggccgctggcgagcatgtcgatcagggtgacggtgaggaacaccgccatcgggtcgttgctgccggattcgatttccaggctggcggtgacccgttcgttcaggcctttgccgccgagcagcgagaacaccgctgcggcgtccgtggagccgacaatcgcgccaatcagcaggccttggatgatattgagatcaaacagccaggccgccgccatgccggtgaggccggtggtaatcaacacccccaccgtggccagcgacaacgccggccagagtgccacgcggaaactcgccacccgtgtgcgcaaaccgccatcgagcaggattacggccaaggcgaggttgcccaccaggtaggcggttgggtagttatcgaagatgatgccgccgccatcgacgccggcgaccatgcccacggccaggatgatcaccaggatcgggatccccaggcgggacgaaagagaactcaccagaatgctcgcacttaccagcaacgcgccgatcaggaacaggctgttgatggtcgtcgcattcaaaggcagtactccatgggcaaacaagacggggcgcaaactgaccatgcagtctgcgtgccagcgattctaacctgttgaattgctgcgctgtcaaaaagcttttaaagacaggcgtagatctaaatgtgggagggggcttgcccccgatggcggcctgtcagccaacttatctgtagctgaaccatcgcaatcgggggcaagccccctcctacattatttgaatcaggtgtgtcagttagaggcggaagcggccgaccatgccgttcaagtccaccgccaggcgcgacagctcgctgctcgccgcactggtctggctggcgccagtggctgactgcaccgacaaatcacggatgttcaccaggttgcggtccacttcccgcgccacttgcgcctgctcttccgccgcgctggcgatcaccaggttgcgctcgttgatctccacaatcgcggtattgatggtatccagcgacattccggcgcctttggcgatgttcagcgtcgattcggcgcgttcggtgctgttgcgcatcgaatccaccgcgtgctcggtgccggcctggatactgccgatcatccgctcgatttcgctggtcgactgttgggtgcgatgggccaatgcccgcacttcatcggccactacagcaaaaccgcgaccggcctcaccggcgcgcgccgcttcaatcgccgcgttcagcgccagcaggttggtctggtcagccaggccacggatcacgtcgagcaccttgccgatatcgcgggactcattggccaggtcgccaatcagggtcgcggtggcttgcacgtcaccgctcatgcgttcgatggcgctgacggtttcctgtaccaggtcacggccatcaccggcggaagtggtggcgttgcgcgacgcttcggaggtgctcaccgcattgcgggccacttcttcgacggcgctggtcatctcattcaccgccgtggcggcttgttcgatttcgttgttttgctgggtcaggccacgggcgctttcgtcggtaaccgcgttcaactcttcggcggccgaggccaactgggtggcggagccggcgatgcgttgcagggtgtcacgcagtttgtcctgcatcttggccatggccgccagcaggcgcccggcttcgtcgttgccgtcgaccttgatcgggcgggtcaggttgccttcggccacttcttccgcggcttccaacgcctgggaaatgggtagggtgatgctgcgggtcagcagccaggcgaacaacagggtcagcagggtggcgaccgccaacaggcttaccaccaagttgaaggccatgttgtattggtcctcggcttccttattggtctccagggccatcttgttgttgaggtccagcaggcgcgtgagcacggcgttgacctgttcggagttgctcagcagttcggtgttgagcaggctgcgcaattcttccacctggttggcccgcgacaggctcttcatgcgctcttcaatctggtggtactggccgagcaggcgaacgtattcgtcgtaggtcgagcgttcttcagggctttcgatgagtttttcgtagatgccctgggcggtgcggatctgctggttgcgcagttcgaaggcttccagggtcttttgctgcacgtccggctcgcggttggtcagcaggcggtacgacagcacccgcagccgcagggtcagttgggtgaactcatccagggcgcgaatgctcggcacgctggacagggtgatgtcttcggtggcgccgcggatcttgctcatctggttcagcgcgaacacaccgagaaacaacatcagcgcaccaataaacgcgaagccgaggaaggccctcggagcgatattcatattacgaagcgacatgcgggaatcctgggggagagcgcgatccatgcggccatgaaacggagtgtccctctctatcggtcgtacgactaaagtctaaagggcgctgtgcgtttttgtcgcacctgacgaggggtttgctcgattcaggaaccagatcgggtaaatgcagtcactaaggctcgaaagtgcggcccggcccttaaaaatcgggctgcgcgccggggataaccctggcatccgaggtgaattttctttatcgtcaccgccctttgaaaaagcccgagaaatcaaaatgttagaagcatccctcagccaattggaacaactggtcagtgacctcgtacagcagaatcaggacctgctgggcagcaacgaatccctcaaggccgaactggcccgcgccaaggatgataacgacagcctgcaactgagcctgatggaacaggaagagaagcacggtgccactgccgcgcgtatccaggcgctggttgagcgtgtgagtgcagggcctgtcagcgcatgagtgaagggataaaggtcgtttcgattctcggagaggattactcgatcaaggccccgcctggggaagataaaaccctgatgcacgccgtgaccctgctcaaggcctccctggccaccaccaagaaaaagtacccgaccctgatcggtgacaaattactggtgctggcggctctgaacctgtgcgccgagcagatcgaaatgcagcaggctcaccagcaggaactcgaccgttaccaagagcaagtcagcgccacggtcgatgtgatttccaaggcgatcggaacgccttagaaccactcatcctgcatcccgaggcacgtatcatcgcgtgcctccagaatcgccagttcatgatggcagcccggtacttcccaggtcaggaagtaccgggcggcctggagcttgcctttatagaaggccacatcggccgcgttgcccttggccaagccttcttcggcacgaatggcctgttccagccagcgccagccaatcaccgtatgcccgaacaccttcaagtacagcgccgaattcgccaggctgctgttgaccttgccctgggcgagatccgtcagcaggccgatggtcacgctttgcaggcggtttaccaactgctccaacggttcccttagcgcagtgaggcttgggtattgctgcgcacgggcgccggtttcggcgatcagccggatgagttgcttcaagcccgcgccgccattctgtgccagcttgcgtccgagcaaatccagggactgaatgccatgggtgccttcatggatcgggttcaggcggttatcgcggtagtactgctccaccgggtattcacgggtgtagccgtggccgccgagaatctggatcgccagttcgttggccttgaggcagaactccgacggccaggatttgacgatgggggtcagcaggtccagcagttcgtgggcctgtttgcgcgcgtcttcggtttccagggtggtggtgtcgtcgaacaggcgtgcggcgtagaggcccaggtcgaaggcgccttccacgtaggacttttgcgtcagcagcatgcgcttgatgtcggcgtgctggatgatcgagaccggtgcagtcgtgggatccttgctgtccggcaggcgaccttgagggcgctcgcgggcgtactccagggaatagaggtaaccggcgtaaccgagcatcaccgcccccatgccgacgccaatacgcgcctcgttcatcatctggaacatgcaactcaatccctggtgcggtttgcccaccagatagccgacacagttgccgttatcgccgaaattcaacgccgtggaggtggtaccgcgccagcccatcttgtggaacagcccggcaagcaacacatcgttgcgctcgcccaggctgccatcgtcgttgaccaggaacttgggcacgataaacagcgaaatgcccttcactcccgcgggcgcgtccggcagcttggccagcaccatgtgcacgatgttttctgacagcgggtggtcgccgccggagatgaagattttgttgcccttgagtcgataggtaccgtcagccgctggctctgcgcgggtacgaatatccgacagcgatgagccggcgtggggttcggtgagtgccatggtgccgaagaaacggccatcgatcatcggttgcaaaaagcgttgcttctgatcgtcggtgccaaagctttcgatcaggttggcggcacccatggtcaggaacgggtaggaggtggacgccgcgttcgccgattggaagtgcgcgaaacaggcttgtgaaagcagtgtgggcagttgcatgccaccggcgtcgaaactgcgtgcggcgttgaggaagcccgcttcgaggaacgcatccaccgccggtttgacctccggaatcaggatggccttgccgtcttcgtagcgcggttcgttctcgtcgttcttgcggttgtggggggcgaagtatttttccgcaatgctgcgggcggtgctgatggccgcatcgaaggtttcgcgattgtgctcggcaaaccgctcgcgctgggtcaggccctcggcatcgaggacttcatacagctcgaaagccagattacgggaactgagtagcgtctcggacatggcggattacctatggaggagtttgcctgagtctaagtgcgcgaatagaggctggatagcaagattgatttgggtgatgcacaggcaaatgtgggagggggcttgcccccggtggcgatgtgtcagtcaccaagtgcattggccgatccaccgctatcgggagcaagccccctcccacattttttaccgcatttcgtcaggcagttagccgatggtcatcaggctggcgttaccgcccgccgcagcagtgttaacactcaacgcccgttcgatcaccaaccgctccagcgcaatcgccgtctcgccctgggacaaaccatgcaccccgacaatcgcgccaccacgctgcgccacttgctggcacaccgcacgcaactggtcggaatcgccgtggtgcagaactgcgtcgaataccacttcgtccttggtccagtcagccacgcgcttgatcttcgcctgaatctccttcggcaggcgtgggaacaaggccttggtctggtcggtttccggccataccgccgaaccacctacggccagcactgccgccagttgcgtcaacagatcagcttccacgtccgccaggcacagtacgtgctcgcggggcaggatggcgtagctgttgcgctcgccggtcgggccggccagttggcgggtgataccgctttgcgattgcgcggcgaactggcggcacaaggcgctcaggtcgctggactgattgctgtcggcccaggttttgagggcggtcagcggttggctcatggcatcgcgcaaacgaacatccggtgcggccagtgcgtcgccgcgtacgaaggattgctcgatggcatccgtaggacgggtcgacagcaggcggtacaggtacagcgggccgccggctttcgggccagtgcccgacaggccttcgccgccgaacggttgcacgccaaccacggcgccgacgatgttgcggttcacatagacgttaccggcatggacgttgtcgatcaccttggcgatggtctcgtcgatgcgggtgtgcacgcccagggtcaggccatagccggaagcgttgatctggccgatgagctggtcgatctctttgcgcttgtagcgcaccacgtgcagcaccggaccaaagatctcgcgttgcagttcgtcgaagctttccagctcgatcagggttggcatcacgaaggtgccgcgcttgatctcttcaccatcggcaatcgccacctggtacacattgcggcctttgtcgcgcatggcctggatgtgtttctcgatgccggccttggcttcggcgtcgatcaccgggccgatatccaccgacagacgctccgggttgcccaggcggcattccgccatggcccccttgagcatttcgatcacgcggtctgccgaatcttcctgcaggcacagtacacgcagggccgagcaacgctggccggcgctgtcgaaggccgacgaaaccacgtcgatcacgacttgttcggtcagtgccgaggagtcgacgatcatcgcgttctggccgccggtttcggcgatcagcgggatcggacggccctgggcatccaggcgtccggcgacgttgcgttgcagcaggcgcgccacttcggtggagccggtgaacatcacgcctttgacgcgatcatcacccaccaggcgggcaccgacggtttcaccctggcctggcagcagttgcagcacgccttgcggaatgccggcttccagcaagatgcgcacagcttgtgcagcgaccagcggggtttgctcggcgggcttggccagcaccgggttaccagcggcgagcgcggcggcgacctgaccgctgaaaatcgccaacgggaagttccacgggctgatgcagaccaccgggcccagtggacggtgggcgtcattggtgaagtcgttgcgtgcctgcaccgcgtagtagcgcaggaagtccacggcttcacgcacttcggcgatggcgttggcgaaggtcttgcctgcctcgcgggccagcaggcccatcagtggctggatctcgccttccatcaggtcggcggcgcgctccaggatggcggcgcgctcggcgggcggggtggcctgccagatcggaccggcactgatggcgcattggatcgcgttgtcgacgtcttcgacagtggcttcttgcacatgaccgactacatcgcgcaggtcggacgggttgagcaccggcgccgcggcttgctcgctggaggtgcaaccgagcatcggtgcggctttccagttgttgtgagcggtggccagcagcgcgcaggacagcgatgccaggcgatgttcgttggccaggtcgataccggccgagttggcgcggtcgctgccgtacaggtcgcgcggcaatggaatacgcgggtgcggcaggccgaagccgccttccagcgtggccatttgctcgatgctggccactggatcggccaccagctcctggatcgagatggattggtcggcgatgcggttgacgaacgaggtgttcgcgccgttttccagcaggcgacggaccaggtaggccagcagcgtttcatgggtgccgaccggtgcatacacacggcacgggcggttcagcttgccatcggcaaccttgcccaccacctgctcgtacagcggttcacccatgccgtgcaggcactggaactcgtactggccggggtaatagttctgaccggcgatatggtagatggccgacagtgtgtgggcgttgtgcgtggcgaactgcgggtagatgacttccggcaccgacagcagtttgcgtgcgcaggcaatgtaggaaacgtcggtgtacaccttgcgggtgtacaccgggtagccttccaggccttcgacctgggcgcgcttgatttcgctgtcccagtacgcgccttttaccaggcggatcatcaggcggtggcggctgcggcgcgccaggtcgatgacgtagtcgatcacatacgggcaacgcttctggtaggcctggatcacgaaaccgatgccgttccagccggtcagttgtggctcgaagcacaggcgctcgagcaggtccagggacagctccaggcggtcggcttcttcggcgtcgatgttcaaaccgatgtcgtattgcttggccagcagggtcagggacagcaggcgcgggtacagctcgtccatcacgcgctcatactgcgcacggctgtagcgcgggtgcagcgccgacagcttgatggaaatgcccgggccttcataaatcccacggccgtgggaggctttgccgatggagtgaatggcttgttcgtacgaggccaggtacttctgcgcatcgtgttcagtcagcgcggcttcaccgagcatgtcgtaggaatagcggaagcccttggcttcgaacttgctcgcgttggccagggcctcggcgatggtttcaccggtgacgaactgctcgcccatcaggcgcatggccatgtcgacgcccttgcggatcatcggctcgccgctcttgccgatgatgcggctcagggacgaggtgaggccggcttcgttgtgggtggcgaccagtttgccggtcagcagcaggccccaggtggcggcgttgacgaacagcgacgggctgttgcccaagtgcggctgccagttgccggtgctgatcttgtcgcggatcagtgcgtcgcgggtgcctttgtccgggatgcgcagcagcgcttcggccaggcacatcagcgccacgccttcctgggacgacagggaaaactcttgcagcaggccctgaacaatcccggcacggccaccggcactcttctggttacgcagtttttcggcaatcgaggcagccagcttgttggtggcttcggccatcggcgccggcaggcgggcctgttcgatcagcatcggcaccacttccggctcggggcgacggtaagcagcagtgatcgacgcgcgcagcacggattgcggcaggatgctttcggcgaattcaaggaagcactggtgggcgtggtcggtctggacctcgccagcgtcgtcagcgtccttgctgctcaaaccattgagttcggtcagggttgcaccaccctccagcttctccaggtaattgaaaattgcctgcttgatcagccagtgcggcgtgcgatcaatggaggtcgcggcggccttgaggcgctcgcgggttgggtcgtcaagtttgaccccaagggtggtcgtagccattttcttatcctcatgggtgccactaccgagtggcatcagctggcggcaagattagctttgcgcatgcagaggtgcaaccgggtgcaacccattttcttcatgatttttttgatcgtggtcgggaaaaaattcggccttcgacggaatccgcttcgccttggtgcgtttgcttctgagatcggctgttcttgctccgaaaaggagcaaaaaccgggtgttttgcgcatttcacatcaaggtgcaacttattctcgcgaaactggttgcaccttatttgctttgttgaatagcattcgcgcccaaggtgcaaccacctctgaggttcggttcatcggctggcggctttcctggggaaacgtcagtcataaatgcgcggcacgcagctacgtctacctacttccagtgggtggtcgtctgacagaccgccgctacataaaaacaaagccagggcgtcactcttatgagcgttagtaatccaaccctgatcacgttcgtgatctacatcgcagcaatggtgctgatcggcttcatggcctatcgctccaccaacaacctttccgattacatcctgggcggtcgcagcctcggtagcgtggtgactgccttgtcggctggcgcttccgacatgagcggctggttgctgatgggcctgccgggcgcgatctacatgtccggcctgtcggaaagctggatcgccatcggcctgatcgtcggcgcctacctcaactggctgttcgtcgccggtcgcctgcgggtccagaccgagcacaacggtgacgccctgaccctgccggattacttctccagccgtttcgaagataaaagcggcctgctgcggatcatctccgccgtggtgatcctggtgttcttcaccatttactgcgcttccggcatcgtcgccggcgcccgtctgttcgaaagcaccttcggcatgtcctacgagaccgccctgtgggccggtgctgcggcgaccattgcctacaccttcgtcggtggtttcctggccgtgagctggaccgacaccgtacaagccaccctgatgattttcgcgctgatcctcacgccgatcatcgtgctgctggccaccggtggcgtcgacactaccttcctggcgatcgaagccaagaaccctgacaacttcaacatgctgaagaacaccagcttcatcggcatcatctcgctgatgggctggggcctgggttacttcggccagccgcatatcctggcgcgtttcatggcggcggactcggtgaagtcgattgccaaggcgcgtcgtatctccatgacctggatgatcctgtgcctgggcggcaccgtggcggtgggtttcttcggtatcgcctacttctcggcacacccggaagtggccggtcccgtgaccgaaaaccacgaacgtgtattcatcgagctggccaagctgctgttcaacccatggattgccggtgtgctgctgtcggctatcctggccgccgtgatgagtaccctgagctgccagttgctggtgtgctccagcgccctgaccgaagacttctacaaaaccttcctgcgcaagaccgcctcccaggttgagctggtgtgggtcggtcgtgccatggtgttgctggtggcactggtcgctatcggcctggccgccaacccgaacaaccgcgtactgggcctggtgagctacgcctgggccggtttcggcgctgcgttcggtcctgtggtgctgatctcggtgatctggaaaggcatgacccgtaacggcgcactggccggtatcctggttggcgcgatcaccgtgatcgtgtggaaacacttcgagctgttgggcctgtacgaaatcatcccaggcttcatcttcgccagcctcgcgatctacttcgtgagcaagctgggcgcaccgactgccggtatggtcgagcgctttgatgcggcggaaaaagactacaacctcaacaagtaattcgccgggcgttaagcgcctgatgagttgaaagaaaggcccgcttcctacggatagcgggcctttttttgcgtgtgctttacgcagacccagagaggattcgtacgcgttcttgtagggttttactgatttgtccggcgcgtgttcggatgacggcagccgtgatgcagaatcggccaccttacccctcgcagagaaacaccggatgttcgctcctgccaatcaaagtgcctttaccctgtccctcgatggggcgcccagtgaattcaaggtccatggattcatggggagtgagttcatcagcctgccttttcgctttgacctggagttggtcagcgagcaacccgacctcgaccttgagagcttgatgcaccgtcaggcgttcctggggtttgacgcgaatggtcatggcattcatggcctggtgtaccgggtggcccaaggcgattcgggcaggcgccttacgcgctatcagatcaccctggtgccgcagctggcttatttggagcacagcactcatcagcggatcttccagaaaaaaacagtgccccagatcattgcgcaggtattggaagcccaggccatcaaggctgatgccttcgcgtttcatctgagcggcaagtatcccgagtgtgagtattgtgttcagtttggcgaaaccgacctggaattcattcagcgcttgtgtgccgaatggggcattcattatcacttccagcacagccccgagcgccaccggttggtgtttggcgacgatcagagcgtgtttgcgcggccggagcacaccacgccgtattcacccggctccgggatggttgccgatgggcctgcgatcaagcgctttatgctgcggctgaagacccgcaccagtgatgtgaacctgcgggactacgacttcaaaaagcccaacctgacgttggaaagcgcagtctccagccagcagcaacccacgctgaacgaccagcgttacccagggcacttcgtggatcgtgagcgtggcaagtacctggcgcaacgcgtgttggaacgtcatcgcagcgattaccgccaggccagcggccatagcgaccaaccggcgttggtcaccggacagttcctgaagatggctgggcaccctcgtcaggagtggaatgacttatggctggtcacccagttgcaacatgttgggcggcaacctcaggtgtttgaggaatctacccctgaagggtatggcgatgaatcctctcaaggctaccgcaatgaatttgtcgtaacgccttgggacgtgctgtttcgaacaccgctcatgatggcgcggccgcccatgtcgggttaccagaacgcagtggtgacgggccccgccgacagtgaaatccattgcgacgaatacggccggatcaaggtgcaattcgcctgggaccgcgccggtgaacgcaacgatcagtccagttgctggctgagggttgccagcggttgggcccatgatcgttatggttcggtactgatcccgcgggtcggcatggaagtcctggtgggcttcgtcaatggcgacccggatatgccgctggtgatgggttgcctgcccaatgcggcaacacaggtgcccctcgatttgccagcggacaaaacccgcagcatcttgcgcagccagagcagccccgggggtggtggctataacgagctgcgcatcgaggatcgcaagggcgccgaggaaatctacctgcgcgcccagcgggactggacgcagcatgtgctgcatgaccatcgggtgacggtggacggcgaatcgcaccatgaagtacagggcgaagagcagcggataaaccatggcagccgcctgaccgagctcaagcaggacgaccatctggtggtgggcggttcgcagcaggtgcgggccgggcagaccatccagataagcgcaggacaaagcatcgtcatcgatgcgggcgcgaccgtcacgattcaggcgggtgggcagtcgatcaccctgtctgccggcggcattttcagcagcgtaccgatccagcctggcggtgggcccgctgctgtagccgcgccgttgatgccgggagtgaaggcaaaactgttggcagtgatccccgctccgctttctcgcgtgcaggttgccagcctgaaacgcagcgcaccgttttgccaagagtgcgagcgttgcaggagcggccagtgcgacctcacctgacttccatctagaaggactctaagtcgatgcttcaacccttgcttgctggtgaaaagatcttcgcagtactcggcgctgccagcgacgccgagcccttgaatgcgtggcgaacgctggccagcggagcgcctttgcatcccgtttgggccggtacggcctatgcgacctgggaggaggtgatgccctatgtgggcgtcgtcgatccagggagcgcgttcttggaatgggccgccgccactgacgctacggattggggttggctggccgtatcgtccagctcgttggacgtggtggtcgcacacttgcaaagcctgaccaaggtgtacctggccgatgggcaggaggtgttcttgcgcttttgggatggggcgcagtttctgccgatccttcaacagcagggtgaagaaatattgccggtattccagcgctacctgatcaatggccaaccactgtcgggggcatctggcccagtcactgccgccaaagccagcccatggtggcgggtgccggcacctttgctggagcacttggcggagcaatcgccgcaaaccctgatcggtaacctgttgcaatggctcgaagagcagcgccccgacctctacacagcttttgcgccgacgaccttgcagcacaaggtcgcctactttgcgcgtcggtcggatatcagccatgaagcgctggctgactacctggcctcagagctgagttgagcccagcgcctgctgcaaatcttcgagcaggtcttcaatggcctcgatgcccaccgacaggcgaatcatctccggcttcacaccggccttggcttgttccagttcgttcatctgccgatgggtggtggaggcggggtggcaggccagggatttggcatcgccgatgttcaccaggcgcttgaagatgtgcagtgcgtcatagaagcgcacgccggcctcatagccgcctttcaagccaaaggacaggatcgctgagggtttgccttgcaggtacttctgcgccaattcgtggtgcgggtggcccggcaggcctgcgtaactgacccactctacctcggcatggccttgcaggaactgcgcgactttcaaggcgttttcagtgtggcgttccatgcgcagggccagggtttccaggccttgcagcagcaggaaggcgttcatcggggccaatgccgcgccggtgttgcgcagtggcacggtgcgggcgcgggcgatgaaggcggcggggccgaatttttcggtgtagaccacgccgtgataggcgggctcggggttgttgagcccggggaatttctgcgggtagtcggtccaggggaagttgccgctgtcgacgatcacgccgcccagggagttgccgtggccgccgatgtacttggtcaccgagtgcaccacgatatcggcgccgaacatgatgggtttgcacaggattggcgtggccacggtgttgtccaccaccagcggtacgccgcgcgcgtgggcgaccttggccagggcctgcaggtcgacgatgttgcccgccgggttgccgatgctttcgcagtacaccagcttggtgtcgtcgtcgatcagctcggcgatggcttcggcggagtcatcccgggcaaagcgtacatcgacgccgaaactgggcagcaagtgtgcaaacaaggtgtaggtgccgccgtaaagctgcggggtggtgacgatattgtctccggcgcgggtgagcgtctggatcgcatagtggatcgccgcgctgccggcggacaccgccaggcctgcgataccgccttcgagcgcggcgatgcgctgctccagcacgtcattggtggggttcatgatccgcgtgtagatattgccgggcacgtccaggttgaacaggtcggcaccgtgctgggcgttgtcgaattcgaaggcgacattctggtagatcggcacggccacggctttggtagtcgggtctgaggtgaagccgtggtgcagtgcgatagtggcgtctttcatgatggtgatggacctccctggagtgtggatcgccacaataagtccgagtcatggctgatatttagacttttttcaggtggatacctgtcttttcgatataagcaccgcccggcacgttgctctgcaccaacgctcgcgtaaaaggtaaacttcgccccctgcgcaggagcaaccatgaattatcgtcacgcctttcacgccggcaaccatgccgatgtcttcaaacacctgaccttgacccgcctcatcgccctgatgtcgcgcaaggagcagccgttcgcctacctcgacacccatgccgggatcggtctgtacgacctgcagggcgaccaggccaaccgcaccggtgagtacctggaaggcatcgctcgcctgtggggcgaaagcgacctgccaccgttgaccgccgattacatgcgcgtgctgcatgagatgaacccggatggcgagttgcgctactaccccggttcgccggaactggcgcggcgcctgacgcgccctcaggaccgcgtgctgctcaatgagaagcacccggaagacggtgtgttgctcaaggacaacatgaagggtgaccgccgcgtcaaagtgcacctgggcgagggttggcacgtaccgcgtgcgctgctgccggtgccggaaaaacgcgcgctgatgctgatcgacccgccgttcgaaaagctcgacgagatgcaacgctgcgccgcctccctcaaggaagccgtgggccgcatgcgccagaccgtcgcggcgatctggtacccggtgaaggaccagcgcctgttgcgccgcttctaccaggacctggctggcaccggtgcgccgaagttgctgcgggtggagttgctggtgcatccgcttgacacccccaacaccctgaccggctcgggcctggccatcgccaacccgccatgggggctggaagaggaactgcgtgagctgctgccgtggctgtccaagaagcttgggcagacccagggtgggtggcagatggattggctgatcgctgaataaccggatctacaggcatatataaaaacaatgtgggagggggcttgcccccgatagcgatctgtcagttacagatgtactgactgacacactgccatcgggggcaagccccctcccacattttgacccgtgtcggcttcagatcgggcaggtcacgccggtgccgccgatcccgcaatagccctgcggattcttcgccaggtactgctggtgatacgcctcggcgaagtacaccgtcggtgcttcttcgatttccgtggtgatcgcacccaaccccgccttggtcagttctccctgatacgcctcggcgctggcctgcgccgccgccagttgttccggggtggtcgcatagatcaccgaacggtactggctgccgatgtcattgccctggcgcatgccctgggtcgggttgtgcagttcccagaacattttcaacaaatcttcgtatttcactttggcctggtcatacaccaccagcaccacttcgctgtggccggtcaggcccgagcagacttcttcataggtcgggttgggcgtgtagccgccggcgtagccgaccacggtgctgaccacgccatcgcgctgccagaaccggcgttcggcaccccagaagcaacccaggccgaagattgcaaagccgacatcatcgaggaacgggcccagcagcgggttgccattgacgaagtgcgtctccggcaatgccatcggggtttcacggccaggcagagcttgttcttgagtaggcagcacgtttttgttcaccagaatttccgagcgcaagaccatgatcagtcctctcgtcaggttgagttagcaataaagattgagaccgccagtgtgcccgagtgttacagcgctgtcaggcgattggcccgcgcgggtagcgtttgagcatcgccagcagctcggcgccggggatcggccggtcgaacaggtagccttggcccacatcgcaacggtgccggcgcaggaacgccagttgctcggcggtctcgatgccctcggccaccaccttgagcttgaggttgtgggccatggcgatcactgcggaggtgatttccatgtcgtcctggttgtccgggatttcgtggatgaagctgcggtcgatcttgatgatatcgatggggaattttttcaggtaactcaacgacgagtagccggtgccgaagtcgtccatggccagggtcaggccgaagctcttcaattgatctagctgcaggcgcgtgtcttcggtggcttccagcagcaggccttcggtcagctccagctccagcaggttggccggcagttgttcttccttgaggatcgtggcaatcgaggccaccaggtccgggtcggaaaactgcttgggcgacaggttgatcgccacctgcaagttacccatgccagcggcggtcaactgtcggctcatgcggcaggcctggcgtgcgatccatttgccgatggggatgatcaggccggtttcttcagccacgctgatgaattggtcggggcggatcatgcccttttccggatggttccagcgcaatagcgcttccatgccgagcagacggccactgcgcaggcacagcttgggctggtagaacacgtccagttcgttctgggtgagggcgcggcgcaggttgttctccacgaacagcttgtagctggcctcggcattcagtgcttcggtaaagatctgcacctggtgtttgccattggccttggccttgtgcagggccaggccggcgttgcgcatcagggtctgcgggtcgcggccatgcagtggcgcgcaggccagaccgacggagccggtgacactgatcaattggttatcgacgaacatcggcttgtcgagggtcgccagcaattggctggccaccagttggccgctttccaggtcagtgtcgtcgagcaacaccgcaaactcgttactggcaaagcgcgccaggctgccgccggtgctcaggctgttgcgtaggcggcgagccaggctgatcagcagcttgtcgccggtctggtggccgaggctgtcgttgatgcgcttgaagttgtcgatgtccaccagcagtaggctgatcgggctgtcgctgtcacgggcaaagcgttcatcgaggttgcggatgaacgccggacggttgcccaggttggtcaggttgtcggtgtaggccaggcgctcgatgcgctgctgggccagcttggtctgggtgatgtcttcgtagatgccgatgtagtgcgtcaactcgcggttgtcgccgtacaccttggaaatcgacaactggccccaatagggctccaggttcttgcgccggcttttgaattcaccctgccagctgttgctcttggccaggctcgagggtgcgtcgaagagcaattcgctgaggttctccagcgctggcaattgggccaggcggtggccgtggacctcttcggcgctgtactgggtgatcgcggtaaagcttgggttgacgtactccaccacgccgtcgcagttgaccagcagaaaggcattggcgctttgttccacggcacgctggaacaggtgcagggcgctggtggcggtgcggcggttgtggttgttgatcacctgggcgaactggtcggccagttcgccggcaaaggcaatttcatcggcttgccaggcgcgggtgctgccgctttgctccaggcacagcacgcccaccacatgaccatcgacacggatgctggcgtcgagcatggcgtggatgtctttgtcgcgcaggctgtcggccatttcccgggtgcgtgggtcgcgcagtgcgttggtggcgtcaatggcccggctggagtgcaaggcttccaggtagtccgggaaacagctggcgtcgatgggctcgggcaagtggtgctgcccgtccgcgcggtgataggcggagatcggcaccaggcgctggccttcgaggttccagatgctggcgcagtcgatctggtagatatcgcaggcgctgcgggtgatcagctcggcggcttcctgcaacgaattgtgggtggtgtagcgctggcgggccagcaacagaatcagttcctgctgggcgcgcacccgctccagatgctgcagctgttcctgctgggcgcgttggttgagttccagggcgatctgcaggcggctgttctggttttccaggtctgccgtgggcacggcagtagggatttcactgaacaggccgtcaaccaccatcaggtagccgcgcagcaagtggcgattgtgttgtttataggcctcacccatttccagcagactcagcgggccgtcgctggtgtgcagggtatagcgcaccaggtaatgcgggctctgggtcagttgctgctggatggtgtcgtgcagttgatagcgcgcctggggctccatcaggctggcgtatggggtgccgatcagcgcgcacagctcgacagccggcaggccgaattggcgctcgcagttagggtcgaggtaaaggagggcccagcttgcctcattcagccgctcgaaacgcagcataccgaggcgcgaaggcaccggtaactgcgtcactacctcggccgccatacgggcgacatcgggctggcttttcatgggggaaactcacttgaaattacgcgcacggcgccgggctcgcgccctcttttctgttgcctgcggcaaggttgcatcatgcggcgcgggctgacaagagaggatgaaggctaagtgctataagggggttatcggctgtagaagggatttctgcaatcgaggtgatggaaggtgtacaaacctgttttgcgcgtccagcttcttgcctgaaaaccggcaaaaaaagccccgccaagtggcggggttgaggtacgagcgtggcgctcgaaaatcgatgcagccaggcctcctcggtgaagaggaggccgtggcggcttacagcaggatagtgcggatatcgttcagcacttggcccaggcgctgggtgaagcgcgcagcggcggcgccgttgatcacacggtgatcgtaggacagcgacagcggcagcatcagcttcggctggaacgctttaccgtcccaaaccggctggatagtcgccttggacacacccaggatcgccacttccggcgcgttgacgattggcgtgaagccagtgccgccaatgtgcccgaggctggagatggtgaagcatgcaccctgcatgtcgtccggggtgagcttcttgtcgcgggccttggcagccagtgcggcggcttcggcagcgagctgcagcaggctcttctggtcgacgttcttgatgaccggtaccagcaggccatccggggtgtcgaccgcaaagccgatgtgcacgtacttcttgcgaatgatcgccttgccgcttggcgccagcgaactgttgaagtccggcagctccttgagcaagtaggcacaggccttgagcagcagcggcagcacggtcagtttcacgccggctttctcggccacggctttctgcgcaacgcggaaagcttccaggtcggtgatgtcggcctggtcgaactgtgtcacgtgcgggatgttcagccagctggcgtgaaggccggccgcgccgatttgcatcaggcgggtcatcggcacttcttcgacttcgccgaagcggctgaagtcgacggtgcggatcggcggaatgcccgaaccaccggtagcgccgccagcagctggcgcttccttggctttctgcatcatggccttgacgtagacctgcacgtcttccttcagcacgcggccgtgcgggccggtggccgacacagcattcagctcaacgccgaactcacgggccagctgacgcacggcagggccggcgtgaaccttggcaccgcttggcgcaggtgcggcagcagcaggggctggagcagcctcggcttttgcagcaggtgcaggtgcagcagccggagccgcttcagccttggcggccggagcagcagccggtgctggcgtggcggccggcgcagcgccttgtactttcagcttgaggatgaagtcaccggtgccgacttcgtcttccagcttgaccgcgatgctttccaccacgccggcagccggcgaagggatttccatggaggccttgtcggactccagggtgatcagcgactggtcggcttcgacggtgtcgccgaccttgaccagcagctcgatgatcttggccttgcccgacgagccgatgtccgggacatgaatgtcctggacgctggcggcggcaggtgcagctgccggggccggagcggcctcggcagcaggtttttcagcagcaggcgctggtgcagcagcggcagcaggagccgccgcaggggccgcatcagcggcaccttcgatttccagctccagcagttcgtcgccttctttcaggcggtcgcccagcttcactttcaggctcttgaccacgccggccttgggagcagggatttccatgctcgccttgtccgactccagggtcaggatgctctggtcggcttcgacggtgtcgccgaccttcacaaacagctcgattacttcaccttcaccgctgccgatgtcaggtacgcgaatgagttcgctcacaaaaaatctcctcagcagtccagtgggttgcgtttttccgggttgatcccgaacttgacgatagcgtcagccaccaccttcggttcgatctcaccacggtcagccaaggcttccagggctgccaacaccacgaagtgacggtcaacttcgaagaagtgtcgcagcttcttgcggctgtcactgcggccgaaaccgtcggtgcccaggactttgaattccttggacgggacccactggcgaatttgttcagcaaacagtttcatgtagtcggtcgaagcgatcaccgggcctttacggccggtcaggcactcttcaacgaaggtgcgctgtggcttctggccagggtgcaggcggttgtgacgctctacagccaggccatcgcgacgcagttcgttgaagctggtcacgctccacacatcggcgccgacgttgaactcgtcacgcaggatcttagccgcttcacgcacttcgcgcaggatggtgccggagcccatcagctggacgtggtgcgccgcttccttggtgtcttcttcgagcaggtacatgcccttgatgatgccttcctcgacaccggccggcatggctggctgctggtaggactcgttcatcacggtgatgtagtagaaaacgtcctgctgctcttcggtcatcttcttcatgccgtcctggatgatcaccgccagctcgtagccgtaggttggatcaaaggtgcggcagttcgggatggtggcagccaggatatggctgtgaccgtcttcgtgttgcaggccttcgccgttcagcgtggtacggccggcggtgccgccgatcaggaagccacgggtacggctgtcgcctgctgcccaagccaggtcgccgatacgctggaagccgaacatcgagtagaagatgtagaacggcagcatcggctggttgtggctggagtacgaagtaccggcagcgatgaaggagctcatggcgcccgcttcgttgatgccttcttcgaggatctggcccttcttgtcttccttgtagaacatcacctggtctttatcgactggctcgtagagctggccgacggaggagtagatgcccaactgacggaacatgccttccataccgaaggtacgggcttcgtccgggatgatcgggacgatgcgcgggccgatttccttgtccttgaccagctgcgccaggatccgcacgaaagccatggtggtggagatttcacggtcgcccgaaccgtcaaggatggccttgagggtgctgaggtccggcgtcggtacgctgaagctctgcgcacggcgttgtggcacgaaaccacccagcgcggcgcggcgttcggccaggtaacgggcttcggcgctgtttggctccggcttgaagaacggcaggttttccagctcttcgtccttgaccgggatgtcgaagcggtcacggaacaacttcaggctgtcgacatcgactttcttggtgttgtgcgcagtgttcttcgcttcgccggcaccggtgccataacccttgatggtcttggccaggatgacggtcggttgttccttgtggttcaccgcttcgtggtacgccgcgtagaccttgtacgggtcgtggccgccacggttgagtttccagatctcgtcgtcggacaggtcggcaaccatcgccttgagttcaggcgtgttgaagaagtgttcgcggacgaacgcgccgtctttggccttgtagttctggtactcgccgtcgatgacttcgtccatgcgacgctgcaggataccgtcgacgtccttggccagcagtgggtcccagaaacggccccagatgactttggtcacgttccactgggcgccgcggaatacgccttcaagttcctggatgatcttgccgttgccgcgaaccgggccgtcgaggcgctgcaggttgcagttgatgacgaagatcaggttgtccagcttctcgcggccggccagggagatggcgcccagggattccggctcgtcgcactcgccgtcgcccaggaagcaccagaccttctgcttgccttcagggatgaagccacgggcttccaggtacttcatgaagcgtgcctggtagatcgcttgaattggacccagccccatggaaacggtcgggaactgccagaaatcaggcatcagccaagggtgcgggtacgacgacaggccgttaccgtccacttcctggcggaagttgttcatgtgttcttcggtgatgcggccttccatgaacgcacgggcgtagacgcctggcgaggtgtggccctggaagtagatcaggtcgccgccgtgttcgtcggtcggggcctggaagaagtagttgaagccgatgtcatacagggttgcactggaagcgaagctggagatgtgaccgcccaggtccgaatctttcaagttcgtgcgcattaccatcgccatggcgttccagcgtaccaacgagcgaatgcggcgttccatgaacaggtcgccaggcatgcgtgcttcgtgggtaacggggatggtgttgcggtatggcgtagtgatggcgtaaggcagttgcgagccgctgcgggtcgcgagttcgcccatacgggtcatcaggtagtgagcacggtcttcgccttctttgtcgagaaccgattccagggcgtccagccattcctgggtttcgacgggatcgaggtcttgcatggcttgctccagggcggaaaggctaccagaatcggttgcctgaagtttgcgactggccttgtgggcagacgacataaattcttggatggccgaaggttgcttcggcgtcctgtagttttactacaaatcgtcggccatttcagcctttcgaatgtatatacgagtagtaaaactacacaagactgagcgtatggctcggtctggctggtgagcataatcgttattgttgatcttttgcgaacaagaaaaggtgaaagtttgatgttggctgccaaaatgaaattaatttcagctatttctaacctttgttcgacagtccttcatagagcgtggttcttgcgttcacaacacgtagccaattacacgccgatcaaggatagaccatgagccttccaacactggcccaactcccggccattctcttgccaaaagcccagcgggccgagcagtcatttcgtgacgcagtggccgcgctggacgatgatcatggactttctgcgtggacgccgcaacggtgggccgacttcgcccgcgtgtgcgccgccagtgatttcgtcattgaacagagtgttcgtgaccctttgatgttgcttgagctggccgccttgggcgaactggaccgaggtttcgcacctggcgagctgtgcgggcagattgctggcgccgtgcgacaagccgaaacagaagatgagctgggccgtgtgctgcgtcgccagcgcacacgccagcaagtgcgcatcatctggcgcgacctgacccgtcaggccgacctggtgcaaacctgccgcgacctctccgacatggccgacgccagcatcgaccaggcctaccagtggctgtaccaacgccactgcgtacagttcggcacgcccaccggccgacgcagcggcgagccgcagcacatggtcatcctcggcatgggcaagctcggtgcggtggagttgaacctgtcgtcggacattgacttgatcttcgcttacccggaaggcggcgagacggtgggtgtgaagcgcgccctggataaccaggagttctttatccggcttggtcaaaaattgatcaaggccctcgacccgatgaccgtcgacggcttcgtgttccgcgtcgacatgcgcctgcgcccctacggttcagccggtgcgctggttctgagcttcaacgcgctggagcagtattaccaggatcagggccgcgactgggaacgctacgccatgatcaaggcgcgggttgtcgccggcgaccaggtggccggtgcgcaattgctcgacatgctgcggccgttcgtctatcgccgctacctggacttctccgccatcgaagcgctgcgcaccatgaagcagttgatccagcaggaagtgcggcgcaaaggcatggccgacaacatcaagctgggctcgggcggtatccgcgaagtggagttcatcgcccaggcattccaattgattcacggtgggcgcgacttgagcctgcaacagcgcccgttgctcaaggtgctcggcactctggaaggccagggctatctgccaccggcggtgattgccgagttgcgcaatggctacgaattcctgcgttacaccgaacacgcgatccaggcgattgccgaccgccagacacaaatgctcccggacagccccgaagaccaggcgcgcattgcctttatgttgggttttgccgactgggacgccttccatgagcgcctgatgtactggcgtggccgggtggactggcacttccgccaagtgattgccgatccggacgaagaagagggcgaagaaagcgagttggtcgtaggcggtgagtggttgccgctgtgggaagagtcccaagatgaagaggctgcctgccgtcagttggccgaaggtggtttttccgacgcggccaaggccctcaaggcgttggcaggcctgcgcaacagcccgcaactacgcgccatgcagcgtttggggcgcgagcgtctggatgcgttcatcccgcgtcttctggcccaggcggtcgagcatgccaacccggacctggtactggaacgtgtgctgccgctggtggaagccgtcgcccgacgttccgcctacctggtgctgctcacggaaaaccccgatgccctgcgccgcctgctgaccctgtgcgccgccagcccgtggatcgccgagcagatcacgcgcttcccgctgttgctcgatgaattgctcaacgaaggccgcctgttcaagccgccgttggcgccggagctggccgccgagttgcgcgagcgcctgacgcgcatcccggaagacgaccttgaacaacagatggaagccttgcggcacttcaagctggcccaccgcctgcgcgtggccgcctcggaaatcgccggcagcctgccgctgatgaaggtcagcgactacctgacctggctcgccgaagccatcctcgaacaagtgctggccctggcctggcgccagaccgtggcgcgacacggctcgccgcagcgcctggacggcaccctgtgcgatcctggcttcatcattgtcggttatgggaaagtcggcggcatcgaactggggcatggttcggacctggacctggtgtttatccacgacggtgacccccaggccgagaccgatggcgccaagcccatcgacggtgcgcagttcttcacgcgcctgggccagcgcatcattcatttgctgaccacccagaccaactcgggccaactgtatgaagtggacatgcgcctgcgaccttccggcgcatccggtttgctggtgagttcattgggcgcgtttgagcgctatcaacaaaatgaagcctggacctgggagcatcaggccctgatccgggcgcgggtgctggtgggcagccaggatgtgggccaggcgttcgagcaggtacgggcgaacgtattgggacaggaacgggacctggcgaagctgcgccaggaggtcagcgagatgcgcgccaagatgcgtgacaacctgggcaccaagggcacggcggccggcaccggcgccaatgccttcgaagccacggcgctgttcgacctcaagcaggacgccggaggtatcgtcgatattgaatttatggtgcaatacgccgctttggcgtggtctgcgcaacatccatcgttgctgcgctacaccgacaatatccgcattctggaaggcctggagcaggtgggcttgatgcccgccgccgatgcccatctgctgcgcgaggtgtataaggcctaccgatccgccgcgcaccgccaggccttgcagaacgaggccggtacggtggccggggatcagttcgccgacgaacggcgccaggtgatgcgaatctggcaggcgctggagttgagctgaaacactattacggcggggaggcataagcctccccgcatcgtttgtggaaactacatgaatattctgatcgttgggcccagttgggtcggtgacatggtaatggcgcagacactgttccagtgcctgcgcgtgcgttacccggactgccagatcgacgtgctcgcccccgagtggagtcgcccgatccttgagcgcatgcccgaggtgcgcaaggccttgagcttcccgctcggccacggcgccctggaactggcgacccgccgtcgcatcggtaaatccctggcgggcgagtacgaccaggcgatcctgctgcccaactcgctcaagtcggcgctggtgccgtattttgccggcatccccaagcgcaccggctggcgtggcgagttccgctacgtgctgctcaacgacgtgcgcacactcgacaaagcccgctacccgctgatgatcgaacggttcatggccctggcctacgagccgggtgccgagttgcccaagccgtatccgcgcccgagcctgcagatcgacccggcgagccgcgacgcggccctggccaagttcggcctgaccctggaccgcccggtattggccttgtgccccggcgccgaattcggcgaatccaagcgctggccgtcggagcactacgcgaaggtggccgaggcgaagatccgtgaaggctggcaggtgtggctgttcggttcgaagaaggaccatccggtgggtgaagacattcgccagcgcctgattcccggcctgcgcgaagaggcagtgaacctcagtggcgacacgtccctggccgaggccatcgacctgctgtcctgtgccgattcggtggtgtccaacgactccggcctcatgcacgtggcggctgcgctgaaccgcccgttggtggcggtgtacggctccacctcgccgggcttcacgccgccgctggccgatcaggtcgaagtggtgcgcctgggcctggagtgcagcccgtgttttgaccgtacctgccgcttcggccactacaactgtatgcgccaattgctgccgcagccggtgaacgaagccttgcagcggttgcagggctctgcggtcgaggtccgatagtttgcgcgtactggtaatcaagacctcatccctgggcgacgtgatccacgccttgccggcattgaccgacgcggcgcgggcgatccccggcattcaattcgactgggtagtggaagaaggttttgccgagattcccacctggcacccggcggtcgacaaggtgatcccggtggcgatccgtcgctggcgcaaaaacatctggcaaaccatcaagagtggcgaatggcggcgcttcaagcagcaagtccagtcgaccaaatacgatctggtgatcgacgcccagggcctgctgaaaagcgcctggctgacccgttatgtgcgtgcgcccgtcgcgggtttcgacagaaactccgcccgcgagccgatggctgcgcgtttctattcgcgacgcctcgccgttgcgcgagggcaacacgcggtggagcgtctgcgccagttgttcgccgtggcgctcggttatgacttgcccaaaggcctgggcgactacggcctgagcacggaaaaactcctgggcctgccgccgaaaaaaccttttgtgctgctgttgcacggcaccacctgggacaccaagcactggcctgaagcctactggcgcgagctggccgagcgcatgggccgcctgggcgtcgacgtgaaattgccctggggtaacgccgctgaaaaagcccgtgccgaacgcctggcccagggcctgcaaaacgccgaggtgctgcccaagctgaacctggccggtgtcgcccgtgtattggccggcgcccgtgcctgtgtggcggtggacactggcctcgggcacctggctgctgcgttggacgtgccgaccatctccctgttcggcccgaccaaccccggcctcaccggcgcctacggcaagggccagattcatctggccagcgacttcccctgcgcgccgtgcctgcaaaagcaatgtacctatcaaccgacggccgacgacctgcgtcggttcgacctcaagcgcgagtcgcccctgtgcttcacgcgcctgaaccctgagcgtgtggcaagccgactgagcacgttgttactggctgaggagctgcactgatgcaactggcttttgtgctgtacaaatatttccccttcggtggcctgcagcgcgacttcatgcgcatcgccctggagtgccagcagcgcggccatcagattcgtgtgtacacgctgatctgggaaggcgacatcccgcccggcttcgaagtgctggtggcgccggtcaaggcgttcttcaaccatcggcgcaacgaaaaactcagcgcctggatggccgccgacctggccaagcgcccggtggaccgcctgatcggcttcaacaaaatgcccaacctggacgtgtactacgccgccgacggttgctttgaagacaaggcgcaaaacctgcggcactcgctgtaccgctactttggccgctacaagcattttgccgagtacgagcgcgcggtgttcgccaaggacgccaagaccgaagtcctgatgatttccgaagtgcagcaaccactgttcatcaagcattacgacaccccggtggaacgcttccacctgctgccgccgggcattgcccaggaccgtcgcgcgccgccgaatgccgccgaaatccgcgaaggtttccgcaaggaattcaacctcggtgacgacgagctgctgctggtgcagatcggttcgggcttcaagaccaagggcgtcgaccgcagcctcaaggccgtggccgcgttgccgtctgaactgaaaaaacgcacgcgcctgtttgtaatcggccaggacgaccccaaggtattccaactgcaaagcgctaccttgggcctgggcgataatgtgcagtttctcaagggccgcagtgatatcccgcgtttcctgctgggcgccgacctgttgatccacccggcgtacaacgaaaataccggcaccgtcttgctcgaagccttggtggccgggctgccggtactggtctcggccgtgtgtgggtatgcccactacatcgccgaggccgacagtggcctggtactggatgagccgtttgaacaagcacagctcaatcaatacctgacgcacatgctcaccgacactgcacagcgcgcggcctggagccgcaatggcttggccttcgctgagacggccgacctttacagcatgccgcagcacgctgcggatgtgattctggcggagccaaaacgatgaagttgattcttgccgaaccgttcaagactttatgggccgggctcgatgcctttgccgaagtcgagaaactgcaaggtgaagtattccgtgaactggcggcgcgtcgcaccctgcgtaccgaggtggatggccgtccgtatttcgtgaagatccaccgtggcatcggctggggtgaaatcttcaagaacctgatcaccgccaagctgccggtactcggggcgggccttgagtgggcggcgattcatcgcctgcaggcactcggcgtgccgaccatgaccggtgtggcgttcggcgagaagggcagcaacccggcggaccagcactcgttcatcatcaccgaagagctggcgccgaccctcagcctcgaagacgtcacgatcaactgggtcgccgaaccgcctgcacccgcgttgcgtcatgccctcacggccgagctggcgcgcatggtcggcgatatgcaccgggggggtgtgaaccaccgcgactgctacctgtgccatttcctgctggacactgccaagcccatcgatgcgaacaacatcaagctgtcggtgatcgacctgcaccgcgctcaactgcgtgcccacctgccgctgcgctggcgcgacaaggacctctccgcgctgtactactcggcgctggatatcggcctgacccgtcgcgacaaactgcgttttctcaagggctacttccgccagccgctgcgccagatcctcgccgagcaatcagcgtccctgagcttgatgcagcgcaaagccgacaagctgtatgcgcgcaagctgcgttatggggatgcgatctgatggcgggttggaacctggaacctgcgtacgccagcctggcggatgatttcggcagcctcgaagcggtcttcgccctgcaaggcgagcgcctgacccgcgatccgctgtcggaagtgatccgcgtggagcgcggcggggtcaactattacgtcaagcgctacatcggtgccggcaaagggctgcggcgctacctgggcaagccgcgggtcaagtccgaatggcagaacctcaagcgttttgccaaatggggcattcccaccgccgatgtggttgcctgggggctggagcgcaagggcctggcctatgatcgtggggcgatgatcacccgcgaactgccgaagaccgaagacctctcggtattggccgagcgcaacgatgcgcgcctgcacgatcccaagtgggtcaacgcggtgagccgtcagctcgccgaatacacgcgcaccatgcacgatcatcgctttacccataacgacttgaagtggcgcaacctgttgatcgatgaccaccagaccctgtacctgatcgactgccccaacggcgatttctggcgcgggttctggctcaagtaccgcatcaccaaagacctggcctgcctggacaaggtggccaagtatcacctgtccgccacccagcgcctgcgtttctacatgcaataccgtcagcgccagcacctgagtgcagctgacaaacagcgaattcgccacgtggtgaagtttttcgagggacgtgaatgagtgatttcctggcggctgaggaccgggcgctgctggagcgcaacggtttggcgacgttcgacgccctgtgggccaaacaactggatgcagtggatgaacccaacaccagtcgcggcggctggagcagcgtctttcgcctggagctcgacggccacggttattacctcaagcgtcagagcaactacctgacgcgcagcctgcaccgtccctttggcgagccgagtttctcccgcgagttccgtaatatcagtcgttaccgcaagctcggcatccctgccttgcaggcggcgttctacggcgaacgcaaggtgggcggcgagcatcgcgccatgctgctgacccgtgccctggacggctggaatgacctggattcgctgctggagcagtggccccaactgagcgatgcccagcaccgcgcgatcctgcgggcctgtggtgagcttgctcgtcggttgcacagcgtcggccaggtgcatggctgtttttatcccaaacatattttcatgcaggctaccggcgacggttatgccgcgcagttgatcgacctggagaaaacccgcccgctgctgttcggctggcgtgatcgggtcaaggacctggagccgttgctgcgacgtgcaccgcagtggtcggatgaacaggtacgccaactgttggccgcctatctggatcaatcgaaggacagcgcgctggtcgccacctggctgcagaaactgaccgcgcgccgtagtcacaaggaaaaccgttgatgcgtctgtccgagctgaaaaccgccggccgtacccccgagctgcccctgacccttgagctggccgatgcggcgggcccaggccagttgcaactgctgagcctgttgcgtgtgctgccgggcgagcgttatgtgggggcggcggtttggcgtggtcgtccggtactggccaaattgttggtgggcggcaaggcggcgcggcactttcagcgtgaactcggcggcgtgcgcttgctcgccgagcaaggcctgaccacgccgttgctgctggccgatggcttgcaggaaggcgagggcggctggttgctgttcgagttcatcgagggcgccgaaagcctggccgatgcctggcaggccatcgaagacctgccgccgctggctgacgagcaaaccgccgtgctggccgaagcgctgggtgcgatcgcccagatgcacaccaagggcctatggcaggaagacctgcacctggacaacctgctgcgccaggacggcaagctgtacctgatcgatggcgccgggatccgcgtcgaagaggcgggcaaaccgctgtcacgcaaccgtgtgctggaaaacctcggcgtgtttttcgcccagttgccgaagaatctcgagccgtttaccgaagaactgctggtgtactacctgctgagtaacggcgagcatgccctgccgctggaggccctggagaaacaggtgcgcaaggtcagcgcctggcgtctcaaggacttcctcaacaaagtcggccgcgaatgcacgttgttcagcgtggtgcgcggcgcctttgccttgcgtgcgatccgccgggaagaagaaccggccatgctgccggtgctggaacaggctgatgcgctgctggaccagggccatttgtacaagaccggcggcgccgccagcgtggccaaggtcgaggtggccggtcggccgctggtgatcaagcgctacaacatcaagggcttcgcccactggctcaaacgcttctggcgtccgagccgagcctggcactcctggcgcgaaggcaatcgcctggcgttcctcggcatcgccacgcccaagccgctggcggtgctggaaaaacgcttcttctggttgcgcagtcgcgcttacctggtcaccgaatacctgcccggcccggacatcatcgagcgcttcgcaccttacgttgaaaatggtgacgcgccggaaaacgaactgttggcgctggatcacctgttcgccgaactgatccgcgaacgcatcagccatggcgacttcaaggggcacaacctgttctgggacaaggaccgctggtcgctgatcgacctggacgccatgtgccagcacagctccgacacgagcttcgccccggcctatgccaaggacagggcgcggtttatgcgcaattggccgcaggacagcgcgttgtatcaattgattgatcagcggttgcccaaagtgagtcagtctggtggccccctgtagcaaagccgtagggcagtatgaatgttgatgcgtgactcggaaaacacgcaaacaacaggattaggcaccccatggcagatgaaaaactaacgtcccctcagttcatgctctttgaaagtgaaactgaggcagagcgcgctgcgcaagttcttgcagtgacgccgccgaaaggtgcgttcagcgacttcattgtgtatgtggatgaaagtggtgatcacggcatgcaggcgctggatgcgaactaccccatgtttgttctagcgttttgtgtttttcataaaagacactactgtgaaaaagtcattccggccctccaaaagtttaagttcaatcatatggggcatgatctcggcgtttttcaaggtagttgtcgtgtctcccgtcttgctaggcgaccttcacgacaactgtcagctccctttcgggattgaggtacaccgtcccgatagggtcccagttgcgtgtctcgcctgaccacctttcaggccttttttctctcgcttgcccatagattgccgccctccgggccaagatttcccggtcttttccctcgtggcgctgggcgggtgtca

SEQ ID NO: 63 - DNA, 25772 bp, Pseudomonas nodulensis
tcattttcaacagcgcagctttgcgttcttctgaatagaaaggcatgaccttactcttgccgcccccggaatacttttaaaaagcggaggacacgacaactaccctgacaccgggggatcttgttggcctgcatgaattggaaatacgtaaggaaaagggggctttctcgaacgtttttgtctctcgccagcacaaacatgcctttcttgaggagctgacaagcatcattgagtcgagcaactttgttttgatcagttgcgttattgataaggtcactcttcgggagcatcaaggtcccgtacataacccctaccatatggcgcttggattctgtcttgaaacgctttatgagtttctcagtgagaaaaatcagcagacagcgttgacccacgtcattttcgaacgacgagggcgtaaagaagataacgcgcttgagttggagtttcgacggatgtgcgacggtgccaatcgtttaggtattcgcctgccatttgacatcgtgtttgcgactaaacaggttaattccacggggttgcaacttgcagatctcgttgcaaggccgataggcatgagtgttctacggcgtggtcaggaaaaccgtgcctttgatgtgctcaagcgcaagttttactgcagcggaggacgaagcaaggtcggtgagggttatgagaactggggacttaaagttttccctaccgcagaaagcgaaaagccccgatgaaactcaccgaggctataacgccgaccgggatcccccagtccatttgcgccagattctatgcttgcgatttttgagtgtcaatgcagagtaattactgctcctcttgcagaatagatgggtgatcagaatcggtactcagcacctgctccggcataccacgagcgccctggcgccgcttcgtaatagcggttattgccgtcgccgacgatcaccgagccgacgtactggcggtcgagcaggttatccaggcgcagggtctggtggaaggtccagtgctcgactttctgctcaaagcgggcgcgccagttgaacacgctgtaggccggcgcagcgtgttggctgttggtgtcttcgacgtagacctggctgcggtacatgccttcgagggcggtgctgacccagtcgcggggcttccagttgagctctgcgaacagggtggtttgcggtacgccgggcaggtagttgcccttgtcgacggcggtgttgccgccgctgacgaagtcactgtcgtaggtagcttgcaggcgggtgtaggcgaggttggcggtccactgttcgctgagttggctttcgatgcccagttcgaagccgcggcgcagggtgcggccggcgttttggtaagtggtgcgaccgccgctggattgctgcaccaccaactcgtcttcggtggtgatctggaagactgcagcgttgatgcgggtgtcctggccaacgcgtgccttcaggccgacttcgtactgtgtactgaccgatggcttgagcgcgaagttaaagccgtttgagctgctggaatacgctgactccgcttgtgtcggggtttcaaagcctttgcccgcgctcacgtagccgtgcaggttgggggtaaacgcgtacatcacgctgaccgagggcgtgttcttctggtaagtcttgctgccgctgtcgttgccgtcgctgagaaaatgatcgtccacgtccatcttcatggtgctgtggcgcaggccggcttgcagggtccagtcgcccagcagccaattggcctgcacgaaggggtcgaggctggtggcggtgtcgatttcatcacggcccagtgcgcccttgacgccgtgcacgccgttggcggtgttggaatagccttggcgatcatcttcgctgcggtcgtagtcgaggccggcgatcaaggtcagttcgcccggagcgctggtgacgggttgtagccagtggatggagccaccgtagaacttgcggtcgaacgccaccacaccgcctcgcacgttggcggggttggtcgcaccgctggggaatttgtcaggaatcgacaagtactgaatcacactccgccgccccgtatacccattcacctgcagcgtcgcatcgccgaagtaccgctcgtaattcatgcccaattgctgatgatcgatacttttgcgcgtgttgtacgtcagcgcgttggcgctcaccgagcgcgggtcggccttgtacgccgcccacgtctgccccagcgggtcctgggtgccgttctgttccaggctgctgtagatcagcgccagtttgctgtcgtcatccggttggacgttgagcttggcgaaggtctggtcgcggcgtgcgctgctgtggtcgcggtagccgttggtgtccatgcgcgaagcgtcaagcacgaagccggcgccgttggtcgcgccttcggcgctcaggtggttcttgttcaggccgtcgctgcccaccagggtttcggcgccgatacgcggcgggccttcgccgtctcgggagaacatctggatcacaccgccggcattgctgccatacagggtcgcggcagggccgcgcagcacttcgatgcgttcggcagtgtcgaggttgaacgtggccgcctggccctggccgtccggggtgctggcgggaatgccgtcggcaatcagcttgatgccgcgcacaccgaacgccgagcgggcgccgaagccacgggaggaaatctgcaggtcctgggcatagttctggcggttctgtaccaccaggccgggcacgcgggacagggcctcggaggcgttgatgcccaattggccatcgctgatctgttcgcggctgatgccgtccaccgagtacggcagggcgaaggtcgggctggcgctgcgtgagccggtgaccacgctggggtcgaggaccagcggggcgtcttcagcccgagcggcatcgctcagggcgaacaggccaggcagcagcaaggtgaagcgggcgaggtttttcatcggtcagcgggaatccatggcgcgcataggcggtagacgcgcaaaggggcgcgagtttagtggctcgggcgatttttatcatttgggaatcgtcctacgctgcaaatcaatgttgctgctttgggtcacctgcccttgcgatgttagcgtggtcagccttggcaataacaatggcagatgggccataaggagagggtcatgaggatggggtcgaaagtcttgtgcagtgtgctgccgcttgtgttggcgggctgcggaaccatcaataccgtgttccggccagacgcggttaccagccagaacctcaaggactcgcgcagtcactgcgaaaacgtgccgcgcgtctacagcggggtgatctacgggttctgcacgctcaatggcgaaccggcgcccgacaagagcctgaaggacaacagcctgatcgaccatagcggtagcatgctacccattgtcgcggtggagtttgtcgcctccggcgtcctggacaccctggtactgccctacaccgtttatcgccaaagccaggacggcagcatcgagatcttccgctgatccctcttgacgctcgtcgctaacagcttcccgccgcttttacgctataatcccgccctttagctgtttcccgcccaggcgggaggcacacttttttcaggcgcaacccgcctgcatgcagactaaaagaggctagacccctgtggcattgacgattcttggcctgtccggcgcccttagccatgatccttccgcagccttgtatatcgacggcaagctgatcgcggccgccgaagaagaacgcttcgtacgtgacaaacatgcaaagaaccgcatgccctacgagtcggcgaagttctgcctggagcaggccggcatcaagccctccgacgttgacgtggtcgcgatcccgttcgccccgatcagcctgttcggcgaggcgcgctggcactacgccaagcgttactggtacgccccggaccgcgccctcgatgcgatcctgatgggcaaccgtcgctacaagcgttatcgcaacaagatcgtctggtgcctggagcaactgggcttcgatccgaagaaaatcaagatcgaaccggttgaacaccacctggcccacgcttccagcgcctaccactgctccggcttccaggagaaaaccgcgatcctcggtatcgacggtaaaggtgagtacgccaccacgttcttcggctacggcgaaaacggcaagatccacaagatcaaggaattctacgatccggactccctcggcggcctgtacggcgcgatcaccgagttcctcggtttcgagatgctcgacggtgagttcaaggtcatgggcatggcgccgtatggcgatgccagcaagtacgatttctcgcgcctggcttcgtttgagaacggtgagttggtgatcaacaccgactacgccaacgtcatcggcctgcgccgttacaaagagaagggcaaggggttctacttctcgccaaaactgatcgagtggctgggtcccaagcgcgaaggcgatatcgccgacgagccgtacatccactacgccgccagcatgcaggcgctgttcgagaaactggccctgcagatgatcgaccactacctgggcgacatcctcaaggacaccggcaagctggccttcgccggcggctgcgcgctgaacgtcaagctgaaccagaaaatcattgcgcgtgacgacgtgaaagagctgtttgtgcagccggcgtccggcgatgccggtactgccgtgggggcggcggcctacgtgtcccacgcccggggtgtgccggtggagaagatggaacacgtctacctcggcccgtcctacagcaacgaagacgtgatcgccgcgtgcgccaagcatgagagcaagccgaactggcgcaagatcgagaacatgccccagcgcatcgccaagatcatggtcgatggcaacccggtggcctggttccagggccgcatggagtttggcccgcgtgcactcggcggtcgttcgatcatcggttgcccaagcgccaccggcgtggcggaccgcatcaaccaccagatcaagttccgcgagcgctggaggcctttctgcccgtcgatgctcgacaccgtcgcgccgcagatgatcaaggtcgaccacccggcgccgttcatgaccttcacctttgaagtggccgaagagtggaaaacccgtgtgccggaagtggtccatgaagatggcacctcccgcgcccaggtgctcaagcgcgagtacaacccgcgctactacgacatgatgaaagagctggaagtactgaccggcaacggcgtgtctctgaacacctcgctcaaccgtcgtggcgaagcgatgatctgctcgccgaccgacgcgctgaacatgttcttcggctccgacctgcagtacctgatcatggaagacatcctggtcgtcaaggacggcgtggacccttatgacgccgtggtctaaatgctgaaccgcttccaggcgtggcgtgagcgtggctggacgcctgtcgaggccgaggtttacgcccaggcctggcagcggtttggcggcagcgttgcgacccatccgcagtttgtcgagcgcttggcgggcctggcgcagattccggtgcgttacctgggctgggaacaggacggtgaactccgaggggcgattgccacctgggggcgcgacctggccttgtccaaggacgtactcaagcgcagcggcaagaaaggcctgtttgacctgggcaatgccgagatcatcctgccgatcactgccgatgcgcagttgccggtgcgccatcgcgggcgttacctgtcagcgctgaacgagggccgcatcagcaccctcaagtcccaggccgagcagttggccatggcgcgtacccccgaagacctgtcgaagaagtttcgctacaaccagcgccgcgaattgcgtctgctggaagaggcgggcggcgtggtgcgggcggtgagcgagttttccagtgtggagctggcggcgatctactgcgatctgttccagcgccgctggggctttcccgccacaggcgccgagcgcctggccgaggtgctggcgctgctcaaagagttcctgatcggctcggtgctgtttctcaacgatgctccgattgccgtacagcttgtgtaccgcgtcgaggcgccggagtggatcagcatcgagtacgtcaatggcggtgtcgaccctgaaacccgggcattcagccccggcagtgtgctgagcttcctcaacacccaaagcgcctgggaacaggcgcgggccgtggataaaccgctgcgcttttccttcgggcgtgccgaccgcgagtacaaggagcgctggtgcaacccggtgccggtgttcagcgtatgagccgcaaacagcaactgctcaagcgccaccggcgcaataaacgcattgccctgctgatcgggctgctgctgttgatcgcggccggtgtgctggtggcctggtggttaccactgatcctcgcggttgtgctgtgggtggcccatgaagcctggtttgccgaccacctgttttattcgcccaaggacgactaccaataccgttttgcgtcgagtggccaacaggtcgggctgcgtctggaaggcggcaggttgctggcagagacgccgctcgagctggctggcgatgaaacgctgatcgtcgaagtgcagctcaaaagcaacctatgggggcgtttgtttgatcctgcagttgaatttctggacgatcgccaggcgttcgaacgtggggtggccggcaaacgttacctcaacctcaccggttcggcggcggcattggtcggcggtgaactgcgcctgcgcggtcgtttttgccgcgtgatcggacagccggtcttgtggctgtttcgccagcctgacgtagcccgtcagcgtgtgatggtgatcgccccccatgccgacgatgccgaactggccgccttcggcctgtacagccaggcggatgaaagctggatcgtgaccctgaccgcgggtgagatcgaggccgagcactatcagcaaatgggtttgcccaaggctgaagcggcgcggatcaaagggcgcttgcgtgcctgggacagcattgccgtgccgcgctgggccggcgtgcccgaggcgcactgcgtgcagttggggtatttctgcctgcaactgccggccatgcgtgacgcccccgatcaaccccaggcatcgcgcgaagcgcagttggacgatacgcggctgttccgccagttcaatgctttggcgttgccgggcgatgtagacggtgcgccgacctggaacaacctgattgccgacctgcgtgcagtgttgctcaaggcgcgtcccgaggtgattgtgttgccgacgccagtgctcgaccctcaccctgaccatatctgcgcccacaccgcggtggtgcaggcattgcaggggcttgagtggcagccgaccatgttgcttggctatgccaaccatctgcacgataacgaccgttggcccatgggtgattcaggcgctggcatcgctttgccgccgcagttcgatgccgcccaggtacttgagccctattgccgggtgctcagcctgagccagcagcaggacaaggccatggcgctgggtatgatgcatgatctgcagccccgtgcaccgttcaagcgccgggtgcgtcgcctgttgcagcaatggctggccggccgtggtccatcgccttacggcgagaacgaatttttccgcaaggctgtgcgccgtcacgagctgctttgggtgctgaagcaggactgaaattgacttttttcgtcgggctgcccgcgtgtagcagcccgattgcctcatggagtgatatgaagcctcgtttcaaggttttgcagttgcagcctgactacaacgtcaaactgaatgacttcgccgatctcggcgagcagatcgtcaaggcgctgccgacggagcggttcgaggtgacgtcagccttcctgagcggtcggccgcagccgggccagccgttgagcgtggcggatcattccaagtatttcgagtttcccgagaaggccctcaaaggcattcgcctgggcgccatgtgggaaatctacaagtactgccgtgagcagaaattcgatgtagtcatctgtaaccgcttcaagtcggtgaacatgatgctgtcgctcaatcgctggttgaagattccgttgtgcatcggtatttcccacggtttcggcgagtacgaacgcgcctatcgccggcgccagacgcgccgcctggtcagcccggcctggcgctttgtcggggtatcggcggcagtcagggattacctgatcggcctcaactgcggctttacccgcgataacaccaccttcgtcaccaatgctatcgatattccccaggccgaagccttgcagttgccacgcgagcaggctcgccaggcgctcgggctgccgctcgacgcacggatcatcggcgcgctggggcgcttggtgccgatcaagggccatacgcacctgctgcaggcgtttgcccgtctcaaggacaaataccccaatgtccaggtcggcatcatcggttccggccgtgccgaagccgacttgcgcgcggatatcgagcgccttggcctcactggccgtgcgcacttgctgggctttcgcgaggatggcctcaaatatgtacgcgctttcgatatctggaccatgccttccttgctggagggcctgggcctggcgttgctcgaaggcatgagtggacgcctgccggtgattgcttccaacgggccggccatgctgccgctggtggaaggggcgggtggtttgtcccacgagcctggcaatgtcgagcaactgacagcggccctggacacttatctggccatgagcgacgagcaattgcgcgccaagggtgaacaggtattccgttatctggaagagaaccacgccctggccgagttccagcaaaagtacctgaacctcatcgaaaccggtttgaaagaagtaggtagagcatgacagcgcaacaacccctggtctcggtgatcatcgcgtcctacaaccacggccggtacatcgaggagagcatcctcagcgtgctcggccagacgtacccgaacatcgagctgctggtggtggacgacggttccaaggatgacagtgtcgagcgcatccagcgcctgcaggccgagcacggctttgatttccaggtgcagcagaaccagggcctgaccgccacgctcaacggtgccatcgcccgcgccaagggtagcctgatcgcacccttcggctccgatgacatcatgctgccagaccgtatcgccacccaggtggcctacatggaaggtaaaccgaaggtgggcatgtgcgctggcaatatcgagttgatcgatggtgacggcaacctgcacccggagaaaaagcagcgccgcgacgtaccgtttcgcagcctggatttcgacgacatgttcatggaccgcaagcccttcccgccggcgccgaccatgttgattcgccgcgaagtgctggaagaagtcggcggcttcgacccactgatccctctggaagacctgctgatccaattgaagatcaccgccgcgggctacaccattgacgcgctcggcgtggtgatggcgcagtatcggcagcacgcaagcaacacctacaagaaccatcgctacatgatccagaacattctcaagacctatgcccatttcagcgagcacccggcctatgacgcggtgcgctacaacttcctcaactcgatgttcctgaagacggctgatcgtgaccggccactggcgcgggagatcctcaagcagatcccgctgaagttctgggggcgcaagaccttgcgtggcttggtgcggttgtacctggcgcccctcaggaagtgaggcggcgggaggtatgaaaaaggcgactatcagcagtgatagtcgccttttttatcaggtggcggggctggccaatgccagcacttgctcgcggatcttcgccgtggcgccttggctggcaacggacgcataacctttggccaactgttcgaagtgtgtctcgaacaaccaggcgcggtcctgtgggtagcgctgcatatggcgcaggttgcgctggcgcaacgcgttgcgcagcggcgacgggaagatgcgcaggtcggcaatatcgatcagggcaaactcaccgtcatccatcaacagcacgttacccaggtgcagcgaacggaagtacacaccgcgctcatgcagcttggccatgaactggccgaaacgttcgatcagcgactcacgcaggctgttgtccaggccttgcagggcctggcgcagggtcaggccgggcagtggcgcgtagctgacggcggtgctggcgtcgcgcaggctatagaggcctagaatctgcggcgtagggatgcccagggtgcgcaattgctcggcgttgctggcaaaccgctcggagtaggggttgaagctgcccgaggtgtaccagcggcgcgcacgaaagatcttcaggaagcggccgtcggccaggcgcaggactttcgggcccagcccgtcggcttcgatcacatgggcattgctgcacagctggtcgaaagctgcgggcttgagcgcttgtaccggcatgcgcaacaggctgtgacggcgctgggcgatgctcaggccggcaatgatcgccaacgggatccacagcacgaaccagtgctctttcgggcgtgacaggatgccacccccttcggtcagcccggcgccgatgccataggtcagcagcgatgaagccaggatgaagagtggctgggcgcgttctttcaggcccttgtacagcccccagccgatcatgaagatccacgggataaagccgatgatgccgacgtaatacagcacgcccagggcaaaactgtgcggctcgcgcagctgatagccgtcggacagggtcaggtacagctcggagtcgtagctgtggccgatccatgggtgttctgcgatgcgttgcagtgacatgccccacagttcaaggcgaaatgagctgcctcgttcggtaatggattccgggtatagcaggagcagtccaatggcccccagaaccaggcctgctatcagcaaagccgagcggcggttgcggctgacgaaggtcatccacaggatggtgagtgtcagggctaccagcggtgtgcgcgagcccgtggccagaaccgccgcgagcatgactgccagagccggggcgctgaaccacaggactttcaggcgctgggtggtcatgcagacatacagccagtagacgcagaagaaaccgaatagatgagagctgagcagcggattgtcgagagcgccacgcccaccgatcatgcgcatgcccggttcgaagcctttgacgaacgccaccaagttgcacaggctcaccaccagtgcgattaccgccgcactgaagaagatcggcttgaacagatcgttgcggtaatgcagcaacagcccgcagccaccaaacagcatgaaggtattgagcgggcgcttgaacaggtcggtgtcggcggtgggctcggggctccacagcaggctggtcagggcccaggcggagaagaccaggaaggcgagcgccaggggctcgcgcagtaacgctttcagctcccgggggcgcatgcacaacatgaacagcgtcggtacgctgaacaggatgtagacaattcgatgcagcacgtttcggttggatacgaagaacagtgagctcagcagcaacaacaagccaatgggtaaaatccacagaaccagaaagtcgaaaacgcgatttgagccatagatcagccgcttggagtgcatacaggaaagccattccgtgttgagaagccgaccatcttaaagtagtggctatataatgtcgccggttgaggccaaccggtttgagggtcatgcagggtgcaagtacaacagagaagctgtgctaaagtcagcctcctttttcaaaacgccgcgtgatatgaccgactccagtccgagcgcaagcccttcgagcttgaaaatatacttccgcctgctcagttacgttaagccctacgccggcttgttcgcgctgagtatcgtcggatttctgattttcgcgtcgacccagcccatgctggggtacatcctcaagtacttcgtcgacggcctttccaaccctgaagccgtgctattccctaccgtgccgttccttcgggacctgcaactgctgcaagccgtgccgctgctgatcatcctcatcgcggcctggcagggcctgggttcgttcctgggcaactacctgctggccaaggtttccctgggcctggtccatgacctgcgcgtgcagttgttcaacaacttgctgacgctgcccaaccgctacttcgacaaccacaactccgggcacctgatttctcgcatcaccttcaacgtgaccatggtcacgggggcggcgaccgatgcgatcaaagtggtgattcgtgaaggcatgacagtgatcttcctgttcgcctcgctgctttacatgaactggcgcctgacgctggtgatgattgccatcctgccgttgatcgcagtgatggtgagcacggccagcaagaaattccgcaagcagagcaagaagatccaggtggcgatgggcgacgtgacccacgtggcctccgaaaccatccagggctaccgcgtggtgcgcagcttcgggggtgaggtctacgaggaaaaacgcttcctcaaggccagccagagcaacaccgacaagcaactgcgcatgacccgcaccggggcgatctatacaccggcgctgcaactggtgatttacaccgcgatggcggtgctgatgttcctggtcctttatcttcgcggtgacgcatcggccggtgacatggtggcctacatcaccctggccggcctgctgcccaagccgattcgccagctctcggaagtcagctcgacgatccagaagggcgtggcgggtgccgaaagcatttttgaacagttggatgaagaggtcgaagtcgacaacggcaccatcgagcgcgacaaggtcagcggccgtctcgacgtacgcaacctgaactttacctacccaggcaccgagcgccatgtgctcaaggacatcagcttcaccgccgagcctgggcagatgatcgccctggtcgggcgctcgggcagcgggaagtcgaccctggccagcctgatcccgcgcttctaccaccacgcaagcggcgaaatcctgctggatggtgtcgagatcgaagactacaagctgctcaacctgaggaaacacattgcccaggtgacccagcatgtgaccttgttcagcgacaccgtgaccaacaacatcgcctacggcgacctggcgggtgcgccgcgggcggacgtggaagcggccgcggcggacgccaatgccaaggacttcatcgatcagttgcccaagggcttcgacacccaggttggcgaaaacggcgtgttgctgtccggtggccaacgccagcgcctggcgattgcccgtgccctcctgaagaatgcaccgctgctgattctcgacgaggccacgtcggccctcgacaccgaatccgagcgccacatccaggcggcgctggacaaggtcatgcaaggtcgcaccaccctggtgatcgcgcaccgtttgtccaccatcgagaaggccgacctgatcctggtgatggacgacggtcgaattgtcgagcgtggcacgcacagtgagctgctggcacagaacggctattacgcccgcctgcatgccatgggcctggatgcgccgatttccgcagacattacctgaacctcccggtaggagccggcaagccggctccttgcaaaaccctcccgcaaacctcccgcaaccctgtgctaatatcgcgcccctgttcattttgtatgtgggttgctccatgaagttgtccatgccgcgattcgatcaagcccctgtcttggtggtcggcgatgtcatgctcgaccgttactggcatggtggaacctcacggatttcccctgaggcgccggtgccggtcgtcaaggtcgagcaaatcgaagaccgtccaggtggcgctgccaacgttgccctcaatattgccgccctcggcgccccggcctcgctggtcggcgtgaccggcgacgacgaagccgccgacagcctggccaacagcctgcgcggtgctggcgtgcgtgcgttgttccagcgcattgcccaccagccgaccatcgtcaagctgcgggtgatgagccgtcaccagcaattgctgcgtatcgatttcgaagaacccttcgccaccgacgccctggcccttagcggccaggtcgatcagttgctcgaaggcataaaggtgctggtgttgtccgactacggcaaaggcgccttgaagaatcaccaggaactgatccaggccgccaaggcccggggcatcccggtattggccgatcccaagggcaaggacttctcgatttatcgcggagccagcctgatcacgccgaatctcagcgagttcgaagccatcgtcggcggttgcgccgatgagcacgacctggtgaccaaaggcgcggcactgatggccgacctcgacctcggcgccttgctggtgacccgtggcgagcacggcatgaccctgctgcgccccggccacccggcgatgcacttgccggcacgtgcccgtgaggtgttcgacgtcaccggcgccggcgacaccgtgatttccaccctggccgcctcgattgccgccggtgaagaactgccccacgctgtggccctggccaacctggcggcgggcatcgtggtgggcaagctcggtaccgctgccatcagcgcgcctgagttgcgccgtgcgatccagcgctccgaaggctcggagcggggtgtgctgagcattgagcaattgctgctggcgattgacgatgctcgcgctcacaacgaaagcattgtgttcaccaacggctgcttcgacatcctgcacgccggtcacgtgacctacctggaacaggcccgcgcccaaggcgatcgcctgatcgtcgcggtcaacgatgacgcctcggtcagccgcctgaaaggccctggccgtccgatcaacagcgtcgaccggcgcatggccgtgttggccggtctgggcgctgtggactgggtgatcagcttccctgaagcaaccccggaaaacctgctggcccaggtcaagccggatgtgctggtcaagggcggcgattattccgtcgaccaagtggtcggggcagatatcgtcagcgcctacggtggcaaggtcaaagtgctgggcctggtcgagaacagctcgaccaccgccattgtcgagaagatccgcaacaatgagtaagcaggttcttgtcaccggcggtgcgggctttatcggctcgcacctggtcgatgcgctgctcgccaaaggctacggtgtgcgggtgctggataacctctccaccggcaagcgcactaacctgccgttggacaatccgcgcgtcgaactgctggaaggcgatgtggccgatgccgagctggtcgcccgtgccgctgtcggcgcagccgcggtggtgcatctggcggcggtggcctcggtgcaggcgtcggtggatgatccggtcagcacgcaccagagcaacttcatcggcaccttgaatgtctgcgaagccgtgcgcaaggccggcatcaagcgcgtggtgtatgcctccagcgctgcggtatacggcaacaatggcgaaggcgcttccattgacgaagccaccaccaaggcgccgttgacgccctatgcgtccgacaagttggccggcgagcactacttcgatttctatcgtcgccagcatggcctggagccggtgatcttccgtttcttcaatatcttcgggccacgccaggatccgtcatcgccgtattccggtgtgatcagcatcttcagcgagcgggtgcagcagggcgtaccgattgccgtgtttggcgatggtgagcaaacccgcgacttcatgtacgtgggcgacctggtggacttgttggtgcaggcgattgaagcgcccgaggctcccttgggtgcaatcaatgtcggctggaaccgcaccacgacgctcaaggatgtgctgcaagccttggaagacatcgtcggcaaactgcccgaagtgacttacgggccggcgcgctccggggatatccggcattcgcgggcgaacaaccagcggttactggcgagttttaccctgcccgaacccaccccattgaaggtgggattggaacgcttgctcaaaggctgacgcgatgtgtagcctgattcaggccttggtttttttcttcggcacgatcttgcgcagcaccctttgggccaggcgcttcaatttcgactctttctcaggctcagccaggccttgctggcgcagccagtccttccagcgaatccgctcctcacgcaccaaccagccttcctgctgggcgaagctttccgccaggtacaaaccccgcgtgctcgccgggtacagctggtctttcttgacggtgtagagctcggccaggggctggccgtctttcaatggcatcaggtacaggtccgggcgttgacggtccaggcgggcgaccagttggtcgccttcaaggcgctcgtcgacatggaacaggctcagggatttggcttccttgggcacttccaggcgcaggtcatagatcaattgcaacgaggcggtgggcaggtgcacataggcgcgcgggcgttcgatcaactgggtggtggcgcagcgcaccgggcgagccgcgccggacagcgggctgaggcgaaagggcagggcttcgcggtaatgcagcgcggaggaatagggcgccggcagccaggtgtcgttgaagcgcccgcccagccagccttccggcgtttccagcaggcactcttcggcaatttcctggatggcggtgtgcagcggcaggttcagctcatgggcgggcacgtagccggagatcagtttgagtaccacgtcgccacggtcctggcggcgctggcgcaccagcacccagtaatccttgttttgccaatgcagggtcaggcgcaccgacacgccaaggttggccagctccagggcgaaacgctcggggtctgccacctccaccggcttgcgccgttgcagggtctgggcaaagttgagcggcatgccgacgctctggtagctcaggccttcgggggtggcttcgacgtgtagcggcagtgtcttgaagttgctggggttttttcttatgagcgttcgcggcatgtcggctccttcttgcgacggggtcggccgcgtcggcggcatcagagttgacgaatgacctgggcagcggtcgccacgttatgggccaggtgcagcggattaatggtcccgacaatagcactggcaacgcctgtttgcgcaaacaacaacatgaaactggcgcgaattggatccattccaggctccaggcaaacgtggccgctggccaaggcctttttcaccaggatgcccttgccgtgggccgccgcatattcaatgacggctttctcggcctgttcgttcaaattgtaggtgaccatcgcgcaatcgccctgttccagagccttcacgccaccctcgacggtcttgccggaaaagccgaaaccacggatcttgccttcctgtttcagcgccgccagggtctggtagacctcgcagtcattgaggatatgcaggtcgttaccgtcagagtgcaccagcaccaggtcgataaaatcggtttcaagtcgtttcaagctgcgttcaatcgacattcgggtgtgggccgcgctgaagtcgtggctggacgcgccattctcgaactcttcgccgactttgctgacgatcacccagtctttgcgctggccgcgcagcagcggccccaggcgttcttcgctcatgccgtaggccggcgcggtgtcgatcaggttgatgcccagttcgcgggcctggcgcaacagcatgcgcgcttcgtcgtcgccggggatctggaagccgctggggtatttcaccccttggtcgcggcccagcttgacggtgcccaggcccagtggcgagaccatcaggccggtgctgcccagggggcgatgaaggtcgtgcagggtaggcaggctcatggcaacagttgctcccaggcaggcacgccgatggtgggttttggcagctcgggcagcggctcgtcgacgcttgggcggatgccgtcacgttccaggctgttgatcacccgatcggcgaagtccggtgccaacgccaacttggtcggccagcccaccagcaggcggccttgttcggcgatgaaggcattgtcggggcgggtcaggcccgattgcaggggctcggcgcggtcgacgcgcagggtcgcccattgggtctggctcatgtcgatccacggcagtaactgcgccagctctttttgcgccgtagcgatctgttcctgcggcgtgcgcgccacgccatcggcctcggcaatatcgccgcccatgtaccacacccaattgccatcggcggccgggtgagtggtgacagtgatgcgtggcttggtgccgccgcccaagcagtgggcatacagcggcttgaggccggggcctttggcgatgatcatgtgcaatggacgtttttgcatggctggctggctgatgcccagcgcggtcagcagatcagccgtaccggcgccggcactcaacacgatgcgctgggcgcggatctcgcgaccgtccaccttcaagcccaccaaagcgtcgccctccagcaacggttcgatgtgctggccggcgagcaagccatcaccggccagttgggccaggcgctcaatcaggcttggcacgtcgatgaccagctcggccaggcgatagaccttgcccttgaaacggcggtcttgcagcgccggcggcaaatcgtcgcccttgacttggtcgacacggccgcgcacggccttgctggcgaaaaaactggtgaggttgccggcaagcgtgccgggggaccacaggtaatgcgcctcggataacaagcgcacgccgcgcaggtccagctcgccgttacccgccagtgcttcgcgccagcggcgcggcatatcggcaatggcttcggacgcgccggtgatggcgccatgcagggcgtatttcgcgccgccgtgaatgatcccctgggacttcacgctttgcccgccacccaaggtggcgttttccaccactaccgtggaaaacccctggcggcgcaggcgcgcattcagccagaggccggcaaccccggcgccgacaatcagaacgtcggtggaaataacggatggcatgggcgacctcagtgttcaagacaagaggcgcagtatacaggctgttgaggagtggtcagtgcccggcggttttcgagaacagctggatcaccaccacgcccagcacaatcaggcccatccccagcatcgccggaacatccagcttctgcccgtagataaacaacgccgcgatactgaccatcacaatgcccattccagcccacaccgcgtaggccacgcccaccggtacggagcgcaccaccagcgtcagcatccagaacgccacgccgtagccgacgattaccagcagcaatgggatgggcgtgctccagcccttgatggctttcatggaaacagtggcgatcacttccgagcagatggcgatggccaggtagtagtaggcggcattcatgggtcagtcctcgggtaaagcgatcagtcaaggctggcattctagagtcttgtcagatggggtaaagtcattacctatccgagtcagagatgggttaggtcatgagcgtgcagtgggatctggaacagatgcgcctgtttgtcagcgtcgccgaacagcgttcgttttcagcggtggcgcgccagcagcgcaaggctcagtcggcggtcagcaatgggattgccatgctggaggcggacctgggcgtcagcctgttcgagcgtagcagcggccgccagcctcggctgaccgcagccggcagcgtgctgctggaggaagcgcgcgaagtgctgcgccagtgcgagcggctcaatggccgggcactgtcattgacccgtggcgaggaagcttgcctgcgcctggcccaggatgaagccatgttgttccaaccggtgctcgacagcctggaggcgttggcgggccagtacccattgctggaggtgcagttgtccagcgcggcccagggtgatgtggcgcgcaagctggtggagcgcaaggctgacctgggcctgctgttctatcacgaccagatccccgaagccctggagcggcgcgtggttggcagcgtggagatggtcacggtatgcggggtgaaccacccgttggccaaggaaacctatgtaacgtgccagcacctggcgcagttccgccagttgctgatgtcgacccagaccagtgtctaccccggcagcgaagccgccagcccgctggtgtggcgcgccgacagtttctacgtgttggccgaatggctgatgagtggcctgggctgggcctggctgccccggcatatcgtgcagtacccgacctaccagcaacagatggtcgaactggacagcgaatggacgccgccggcgctggtggtcgagttggtctggcggcgcgacgagcatctggggccggcggcgcgcttcctggccaaacgatttgccgagtgcttgcaggcgatcgactgaaaaagccgataaactccgccgccatgaatagaactctctacagctgtctgttttacctggcgctgcccttggtggctttacgtctgtggctgcgcgcgcgcaaggcgccggcctatgccaagcgcgtcggcgagcgcttctcctatggcttgccggtgatgcggccgggcgggatctgggtgcacgccgtgtcggtgggcgaaagcattgccgctgcgcccatggtgcgcgggttgctggagcgttatccgacgctgccgatcaccgtcacctgcatgacgccgaccgggtccgagcgcatccaggcgttgttcgccaatgaaccgcgaatccagcactgctacttgccgtatgacttgccgtgcgcggccgagcgtttcctggatcgcgtacagcccaagctcgcggtgatcatggaaaccgagctgtggcccaatcatatccacgcctgcgcccagcgcgggattccggtggcattggccaatgcgcggttgtcggcgcgttcggccaagggctatgcgcgctttgccaggctgaccgcgccgatgctgtcggagatgagcctgtttgctgtgcagacgcaaaccgaagcccagcgcttcctggacttgggcgctcggccggaaaccgtcgaagtcaccggctcgatcaagttcgacctgaccatcgatccccagttgccggtacgcgccgccgcgttgcgcgcgcaatggggcgccagcgagcgtccggtgtggatcgccgcgagtacccatgagggtgaagatgaggtggtgctggcggcccatcgccaactgctcgacagctaccctaacgcgctgctgattctggtgccgcgccatcaggagcgcttcggcccgatgttcgagctgtgcgcacagcaaggctttgccacggtgcgtcgctccagtggggaacccgtcaccgcgaacacatcagtattgctcggcgacaccatgggcgagttgctgtttctctatgcgttggctgacagcgctttcgtaggcggcagcctggtggcgaccggtgggcacaacccactggaaccggcggcgctggccttgccggtgatcatgggaccacatgtgttcaacttcctcgaaatcaccgcgatgatgcgtgaagccggggcgttgcgcgcggtggacgatgcagaagggttggccgaagccgtgcgccagttgttcgaactgccgcaggatgcgcgcaagatggcgcaggcggggctcaaggtgatgcaggccaaccagggcgcgttgaagcgtttactggatggtttaggtcgactgctggctgactgaatcatcacctgactcaatgtgggagggggcttgcccccgatggcggtatatcagtcacctatacggtgcctgacactctgctatcgggggcaagccccctcccacatggggttgcagtggattcagttggcggggcgggccttgagttgttcggccgcagccttggccaggtccggcggcaggaagtcgcggtccgggttgtagtcggccttgaggtagcgcgccaggtcttgcagatcgcctgggttcaaggtgcccgcggcctgcttcaagcgcaggttgtcgaggatgtagtcgtagcggctgttgttgtagttgcgcactgacgcatagagctggcgctgggagtcgagcacgtcgacgatattgcgcgtccccacctgatagccgatttccgtggcttccaccgcgctctggttggagatgatcgactggcggcgcgcctgtacctgctccacgtcggtgttcaccgcgcggtgcaggttgcgggtgttttccaccacctggcggcgcaggccttcgcgctgctgctcggtctggcccagacgcgagtaggactcacgcacctgcgagctggtcagcccgccgctgtagatcgggatgctcaggcgcaggccgatggtgcgctgctcgacatctccacggtacggcgtgccgaaggcattcgggttgctgaaaccgagggcgtcgttgtcgcctttttcatattgcgccacggcgtccaaggtcggcgcgtggccggccttgcgctgcttgagggtttcttcggcggccgtgaccgcgtagttgctggccagcaggttcaggttctggcggccggcggtttcgacccaggccttggcgtcgttcggcagcggcggcagcaccggcagcgtgtggacgatgccctggattgagttgtactggcggttggtcagggtgatcagcgcttcgaacgcgtcctcgacctggcgttgggccaggatgcggttggcgcgggcggtgtcgtagctggcctgggattgcagcacgtcggtcttgtccgacaggcccacgtcaaagcgctcgttggactggtccagttggcgcttgaacgcattttcttcggccttggtcgaggccaggttgtcctgggcgcgcagcacggcgaaatagttttcggcgctctgcaggatcaggttctgttcggtcgccgacagttgcaacgcggcctgctcattggtggcctcggcggcttgcagctggaaccagcggtcggcgcggaacagcggctggctaagggtggcgcgccaggagtgcgcatcgcggttggcggtggcggccggggtgtcgatctgggtgcgcacgttgttgatatcggcaccgccggtcaggttcggcagcaagccggcacgggcctggggcaccacttccttttgcgcgccgtactgggcacgggcggcggccaggtcggcgttgttgtccaccgcttcctggtagacgctgaccaagtcggttttggcggacaagggcgcttcagctgcccagaccattccgttggtcgcacaagacacggcaagagccagtgaaagtttgcgcagcatgaggcgatccctagtttgaatattacggtgataatttagcgcccaaggctaaggctggccattcctggcgtcaagcattgtggcggcaaccgagtgtagtggtgctgactcggcgcaacaatcccgcaatcacgccattcatcacgctgaatgcaccgccattggcaatttgcccacggcatggtctagactggccgcgttcttgtcggggtgccttgttggaaggctgagatcggtaaataccggatcccgttgaacctgatcaggttagcgcctgcgtagggaacaagatttctcgtcacccggcgagtcctcttgtgcttcgtccgggatgttgttcgacaatcgaacagccctcgtgcgccaagcacagcactggttccagtgcgtccgtccgtcacaggttcgctccgacaaaaatccaccgcctggataagttggagagcccgtgatgactacaacattaaaaaacaccgtgcatttgagtgaatcggccaaggtcgactccggctccgtgcagccgtttacccgctcgcagaagatctacgtggaaggcacccgcccggacattcgtgtaccgatgcgacaaatcagcctggacgtcacccccaccgatttcggcggtgagatcaacgcgccggtcaccgtgtatgacacctccggcccctacaccgaccccaacgtgatcatcgacgtgcgcaaaggcctgggcgatgtgcgctcgccgtggatcgaagtgcgtggcgacaccgagcgcctgccgggcctcagctcgcacttcggccagcagcgcctcagtgatgccgagctgaccgcgttgcgcttcgcccacgtgaagaacccgcgtcgtgccaaggccggcgccaacgtcacgcagatgcactacgcgcgcaaaggcatcatcaccgccgagatggaatacgtcgccatccgcgagaacatgaagctcgaagaagcccgcgccagtggcctgctcgaccagcagcacgccgggcacagctttggcgccagcgtgccgaagatcatcaccccggaattcgtgcgcgaagaaatcgcccgcggccgcgccatcatcccggccaacatcaaccacaccgaactggaaccgatgatcatcggccgtaacttcctggtgaagatcaacggcaacatcggcaacagcgccctgggttcgtccatcgaagaagaagtggccaaactgacctggggcattcgctggggttcggacacggtgatggacctgtccaccggcaagcacatccacgaaacccgtgagtggatcatccgcaactcgccggtgccgattggcaccgtgccgatctaccaagccctggagaaagtcggcggcgccgccgaagacctgacctgggagctgttccgcgacaccctgatcgaacaggccgagcagggcgtcgactacttcaccatccacgccggtgtattgctgcgctatgtgccgctgaccgccaagcgcgttaccggcatcgtgtcccgtggcggctcgatcatggccaagtggtgcctggcgcaccacaaagagaacttcacctacacgcatttcgacgaaatctgcgaaatcatgaaggcctacgacgtcagcttctcccttggcgatggcctgcgcccgggttcgattgccgacgcgaacgacgccgcgcaattcggcgagctggaaaccctcggcgaactgaccaagaccgcctggaagcacgacgtgcaaaccatgatcgaaggccctggccacgtgccgatgcagttgatcaaggagaacatggacaagcagctcgagtgctgcgacgaggcgccgttctacaccctcggcccgctgaccaccgacatcgcgccaggttacgaccacatcacctccggcatcggcgcggcgatgatcggctggttcggttgcgccatgctctgctacgtcacgcccaaggagcacctgggcctgccgaacaaggatgacgtgaagaccgggatcatcacctacaagatcgccgcccacgcggcggacctcgccaaaggccatccgggcgcgcagatccgcgataacgccttgagcaaggcgcgtttcgaattccgctgggaggaccagttcaacctcggcctggaccctgacaccgcgcgttcctatcacgacgaaaccctgccgaaggattcggccaaggtcgcgcacttctgctcgatgtgcgggccgaagttctgctcgatgaagatcacccaggaagtgcgtgagtacgcagccaaccagcgcattgaagcggtggatgtggatgtggccaagggcctggccgagcaggcggagcggttcaagcaggaaggcagccagctctacaagaaggtctgattcaagacgtctgtaccggccttatcgggggcaagccccctcccacatgactcaaactgtgggagggggctt

SEQ ID NO: 64 - DNA, 11323 bp, Pseudomonas nodulensis
caagccccctcccacatgactcaaactgtgggagggggcttgcccccgatagcgatccagcaaacaacaaatgcccctcagagataacacccttgagcattcaaccgagtacttactcccccgatatcgcagtgccgagcgacaaaagagtcttcggcgcccgcgacctgttctccctgtggttctccctcggcatcggcctgatggtcctgcagaccggcgcgttgctggcgccgggcctgggcttgtccggttcgttgctggcgattttcctcggcaccctggtcggcgtcctgctgctggccgctgtcggcgtgatcggcagcgacaccggcctgtccgccatggccgcgctcaagctgagcctgggtgccaggggcgccagcctgccggcgctgctcaacctgctgcaactgatcggctggggctcgtttgaaatcatcgtgatgcgcgacgccgccagcctgttgggcgcgcgggcgttcagcgacggcagcctgttggccagtccattattgtggacgctgttctttggtggcctggcgaccttgctggcggtcagtggcccgctgacgtttgtgcgccaggtcctgcgcaaatggggcatttggctgctgctcgccgcctgcctgtggctgacctggaacctgttcgcaaaagccgacctcgccgtactctgggccaaggccggtgacggttcgatgccgttcgcggtgggctttgatatcgcgattgccatgccgctgtcatggctgccgctgatcgccgattactcgcgcttcggcaagcgcgcccaaagcgtgttcggcggcacggcgctggggttctttatcggtaatttctggctgatgagcctgggcgtggcctacaccctggcgtttgcgccgagcggcgaggtgaatgcgctgttgctggcgttggccggggctggcctggggattccgctgctgctgatcctgctggatgagtcggaaaacgcctttgccgatattcactcggcggcggtttccagcggcatgctgttgcgcttgaaggtcgagcacctggcgctggccatcggtgtgatctgcacgttcatcgcctgctttgcaccgttggcccaataccagaacttcctgttgctgatcggctcggtattcgcgccgctgttcggcgtggtgctggtggatcacttcatcctgcggcgccgtggtcagggtactgtcgccaacctgcgttggccggcgctgctggcgtggttgggtggcgtcgtgacgtatcacctgttggccaatctgtatccggacatcggcgcgaccctgccggcgctggtgctggcagggctgttgcagttaattctggctaaagccttcagcggcgtgcaggcaccagctcaggctggatgatgccgtccaggcgtgaatagggaatctgcaattcgacgtggcccagggcgtacggcgcgatggttttggtagggtacttgaggatcacgccaccataggtcagcgccacgttcggggttttctggaaggggtaggtcttcacatactccggctccaggctcaggcgggtgctgatcagccagctgttgtgggccacctgggcggctttccagaacgcgtcttccttgccgggcagcagcatgtcggtcagggtcagggccttttgccgctggcgcgaatagttgatgaatgcgcggcccggctcgccgtgggtggcgccctggtccaggtagctggacaattcgatgatcaccaagccgtcatgctgttcacgtaccttggcctgcaaatacatgctgttgcggggggcggcggttttgaggaattgctcgcgataggtctccaggctggtcggcaggggatcgctttgggtcatttccagcaggcgctgttcaatcaatgcgtccagcttggggtccttggcaaagtgcacggtgtcgatattcaccagcgggcaatcggcgctggcgcagcccggcttgctttgctcggtggcgtcgcgggtggcttccagcggagctttgtagcttggctggaacaggctctggcacgcgccgagggtcaatgcgatacaggccacggaggcgatttttaaaagcgacatgtaagtccttcgtctatcgataagagcgaaatttgtgcagcttcgactgccagcacggcagtcagttcgccactaagctgattagagtgtgtttgacgcccgccgtctatcccggcaactggaaaggggctgcatccagaggcatgagcgcgttaggatggcgccaattgcgcaggctcaacgaggaagggacatgacggattcagcaaaatcgacgccgagcacaatcgagattgttcagcgcgacaatgcctaccagggcttctacaagcttgatcgcgtacaactgcgccatgagaagttcgatggcggcatgagccgggtgatcaaccgcgaagtttttgttcgtcatgatgccgtgtgcgtgctgccctacgacccgcagcgcgatgaagtggtgctgatcgagcagttccgcgtcggcgccatggggcgtaccgacaacccgtggctggtggagatggtcgccggcctgatcgacaaggatgaagagccggaggaggttgcacaccgcgaagccgaggaggaagctgggctgacattctccgcgctgtggccgatcaccaagtatttcccgtcgcccggcggcagtaccgaatttgtccacttgtacctgggccgttgcgacagctcgggcgcaggcggcgtccatggattggaagaagaagctgaagatatccgcgtcaccgtgtgggccttcgaagatgccctgcaagcggtacgcgacggcaaaatttccaacgcagccagcattatcgccctgcaatggcttgcgcttaatcgcgcggaagtgagggggttatggcagtaaaggcacgggaacgttatcgagtcgacctgatcgggctgcaagccgcctgcgaggccaactatgcgcggctgatgcgcctgctccccgacatgcgccatgcccccgaggcacggcgcattggcgtgacccacggcgaccagatgctcggcgtgctggccctggaagtgatcgtcaattgcccctacaccaccaccctgcgcgtgcgccaggaacacagcctgccttggctgccggtgccgcagttggaagtccaggtgtaccacgacgcgcgcatggccgaagtgatcagcgccgaacatgcgcggcgctttcgcagcatctatccttaccccaacgtgttcatgcaccagcccgatgagaaagcacagctgaatgtgttcctcggtgaatggttgagccactgcctggccctgggccatgagttcgaagccgtgcggtagatgtgaactgcgtccgcttcctgggtttcctctttgtgtcctgccccagcataatcacgccaaacgtccattcctgcgattgccttgggagagcgccttgtcgagcgtatccaccgtgagccacgatgcaccggccttgctggtgcaactgtccgacagccacctgtttgccgaggccgatggcacgttgttgggcatgaacacccgtgacagcctgcaaagggtgatcgagttggtgcgtgcgcagcagccacgcattgatctggtgttggccaccggggatctttcccaggacggcacactggagtcgtatcagcagtttcgcgatatgacggcgcccatcggcgccccgacgcgctggattcccggcaatcacgacgagccgcaggtcatggcccacgccgcggtgcacagcgatttgctggagccggtggtcgatgtcggccagtggcgcatcaccctgctggactccgccgtacccggttcggtgcccggttacttgcaggacagccaattgcaactgctcgcccaggccctgagcgaggcgccaaaccgtcaccacctggtgtgcttccaccatcatccggtgtccatcggttgcgcctggatggaacccattggcctgcgcaacccggaggccctgtttgccgtgctcgaccgtttcccacaggtaagggcggtactgtgggggcatgtgcaccaggaaatcgaccgcgagcgcaacggcgtgcgcctgctggcgtcgccgtccacctgcatccagttcgcgccgggcagtgaggatttcaaggtcagtgagcaagcgccgggctaccgctggctgcgcctgcatgccgacggacggttggagaccggggtagagcgggtccagggcttcgaatttaccgtggactacggcagcaacggctattaactgtgggagggggcttgcccccgatggtggtggatcagtcacatctacagtgcctgacactccgctatcgggggcaagccccctcccacattggatcttcggtgtattgaaggccgaggtcatcacacacggccccgatccctgtaaactgcggctctttggctgagtcacggagagcccggcatgtccgcttcgatcctgtatatccacggtttcaacagtgcgcccgcgtccaacaaggccactcagttgatcaccgtgatgggcgtcatcggcctggctgatcaactgcgtgtaccggccctgcaccaccatccccgtcaggcgattcctcaactggaagccgcgattgccgaactgggtcggccactgctggtcggcagctcactcggcggctactatgcaacccatcttgccgaacgccatggcctcaaggcattgctggtaaacccggcggtcagtccccatcggatgttcgacggttacctgggcacccagaagaacctctacaccgatgaaacctgggaactcacccacgaccacgtgacggccctggccgagctggaagtaccggcgccccaggacgccgcgcggtatcaggtgtggttgcagaccggggatgaaaccctggactatcgtctcgcccagcagtattaccgagcctgtgccttgcgcatccaggccggcggcgaccatggttaccaggggttcgcccggcaattaccggcaatgttgagctttgccggcattggcgcagatcagtatcaatccttcgactttgctgcactgtaaagtcgcaggtcattttttaatcgaacgactcacgacgagaccccatggccactcccagcgctagctcttataacgccgacgccatcgaagtcctctcgggcctcgacccggtgcgcaaacgccccggcatgtacaccgacaccagtcggccgaaccaccttgcccaggaagtcatcgacaacagtgtcgacgaagccttggccgggcacgccaagtcggtgcatgtcattcttcacgctgaccactccctggaagtgtccgacgatggtcgcggcatgccggtggacatccacccggaagagggcgtgtcgggcgtcgagctgatcctcaccaagctccatgcgggtggcaagttctccaacaagaactaccagttctccggtggtctgcacggtgtgggtatttccgtggtcaacgccttgtccacgctggtgcgggtcaaggtcaagcgtgacggcaacgagtaccagatgaccttcgccgatggctacaaagccaccgacctggaagtgatcggcaccgttggcaagcgcaacaccggcaccagcgtgtacttcgcgccggacccgaaatacttcgattcgccgaaattctccatcagccgcctcaagcatgtgctcaaggccaaggccgtgctgtgccctggcctgctggtgacctttgaagacaaaggcaccggcgagaaggtcgagtggcattacgaagacggcctgcgttcgtacctggaagactccgtcagtgacttcgaacgcctacccaacgagccgttctgcggcagcctggccggtaataaagaagccgtggactgggcgctgctgtggttgcctgagggtggcgacagcgtgcaggaaagctacgtcaacctgatccccacggctcagggcggcacccacgtcaacggtttgcgtcagggcctgctcgatgccatgcgcgaattctgcgaatatcgcagcctgctgccacgcggcgtgaagctggcgccggaagacgtgtgggagcgcattgcgttcgtgctgtcgatgaagatgcaagagccgcaattctccggccagaccaaagagcgcctgtcctcccgtgaagcggcggcgtttgtctccggtgtggtcaaggatgcgttcagcctgtggctcaacgaacaccctgaactcggcctggccctcgccgaattggcgatcaacaacgccggccgtcgcttgaaggccagcaagaaggtcgagcgcaagcgcatcacccagggcccggcacttccaggcaaactggccgattgcgccggacaggacccgatgcgctccgagctgttcctggtggaaggtgactccgccggcggttccgccaagcaagcgcgggacaaggaattccaggcgatcctgccgttgcgcggcaagatcctcaacacctgggaagtcgatggcagcgaagtccttgccagccaggaagtgcacaacatcgccgtggccattggtgtagacccgggcgcagcggacatgagccagttgcgctacggcaagatctgcatcctcgccgacgccgactccgatggtttgcacattgccacgctgctctgcgcgttgttcgtgcagcacttccgcccgctggtggatgctggccacgtctacgtcgccatgccgccgctgtaccggatcgacctgggcaaggagattttctacgccctggacgaagccgagcgcgatggcattctcgaccgcctggtagccgagaaaaaacgcggcaaaccgcaggtcacgcgattcaaaggcctgggtgaaatgaacccgccgcaactgcgcgagaccaccatggacccgaacacccggcgcctggtgcaactgaccttggatgacttcgccgccacctcggaaatgatggacatgctgctggcgaagaaacgcgcgccggatcgcaagtcctggctggaatccaaaggcaacctggccgaggttctgggctgatgcgcacaggtttcgccctggcgatcctgatgttgagcagtttggcggccacccagttggctgccgcgcctgcggccgagctcaagctggtgtccgaacacccggtggatggcatgcgtggcggcaacctgtcgggcctggcgttgtgcggcaacgagttgtggacggtttccgaccgtgatgacgaccagatctaccgcctggacatcagcgcaccgacctggaaggctgaaacggtaaagatcgacgtgccaccggtgcccgagtccggcttgccgtgggggttgcgttcacgtaccaaggccgcgtctttcattcgcggtggcgacctggattttgaagggatcacctgcgatgccgccggtaaccgctacattgtcagcgaagcccatgcggcggtgctgcaagtgccggtgacgggcgcgcctgagtggttgaagatcgcacccagcatggtgcgtgaagcgcgggccagcggtatgttgctgcacttcaatgcattgtttgaaggcctggcgatcaaccccgaaggcaaccagatctggctggcggctgagcgtgaacggcgtggcctgatttccatcaagcgtccgcaaagcctgtgggactgtgacggcccctgcgtcttgctgagcgaagccggccaggaagtgcaaccagcccagttcccgaacgccaaggcggtgtccaaggattttgccgatctggcgctgttcaacggcaagctgtttaccctggaacgcaatgcgttccagatttgccggcgtgacgcgattacggccaaggttgagctgtgctggtcgtttgccgacgagaccctgacgcctgagcggcgttacccccagccttatggcctggcggaagctctggtggtggatgccgacggtgcctggctgggcatcgacaacaatttcggcccgcgtgccgatggtgaaaaacgccccatggtctatcgttttgccgcccctgccggtggctggagcgccaagccatgagccgatatttttttgaattgacccggcgccgtggcatttccgctgcgccatacccaagcatgatgaggcccgcatgagtgacatcctcgcagacagcttagacggcgtagaacgccggtcgctggctgacttcaccgaaaatgcctacctcaactactccatgtacgtgatcatggaccgtgccttgccgcatatcggcgacggcctgaagcccgtacaacggcgcatcatctatgccatgagtgagttgggcctggacgccgattccaagcacaagaaatcggcgcgtaccgtcggtgacgtactcggtaagttccacccccacggcgactcggcgtgctacgaagccatggtgctgatggcccaaccgttcagctatcgctacacactggtggacggccagggtaactggggtgcgccagatgatcccaagtccttcgcagccatgcgatacaccgaagcgcgcctctcgcgttactctgaagtcttgctgagcgaactggggcagggcaccgccgactgggggccgaatttcgacggaaccctcgacgaaccgctggtgttgccggcacgtttgccgaatatcctgctcaatggcaccaccggtattgcggtgggcatggccactgacgtaccgccgcacaacctgcgtgaggtcgccacggcctgcgtacgtttgctggatgagcccaaagccacggtggagcagctctgcgagcatatccagggcccggactatccgaccgaagcggaaatcatcacaccgcgcgccgacctgctgaaaatgtacgaaaccggcaagggctcggtacgcatgcgcgccgtgtaccacatcgaggatggcgacattatcgtcactgcgctgccgcaccaggtgtccggcgccaaggtgctggagcagatcgccgcgctgatgcaggccaaaccgtcgaaactgccgcaggttgccgacctgcgtgacgaatccgaccacgaaaacccctgccgcatcgtgatcatcccgaccaacagccgggtcgaccacgaagtgttgatgcagcatctgtttgccagcacggacctggagtccagctatcgggtcaacgtcaacatcatcggcctggacggcaagccgcagttgaagaacctgcgcaacctgctggtggagtggctggagttccgggtgcagaccgtgcgtcgccgcctgcaattccgcctcgataaggtcgagcgccgcctgcacctgttggacggcttgctgatcgcctacctcaatctggatgaagtgatccacatcatccgtaccgccgagcacccgaaagccgagctgatcgcgcggtttgagctgagcgagatccaggcggactacatcctcgacacccgcttgcgtcaattggcgcgactggaagaaatgaaactgcgcgacgaacaggacgcgctgctcaaggaacaagccaagctgcaagctctgctgggcagcgaagccaagctgaaaaagctggtgcgcagcgagctgatcaaagacgccgaaacctacggcgacgaccgtcgttcgccaattgtgcagcgtgccgaggcgaaagccctgacagaaaccgagctgctgccaaacgagaaaattacggtcgttctgtcggaaaagggttgggttcgatccgccaaggggcatgatattgacgccaccggtttgtcgtacaaggccggcgacgggttcaagaccgctgcggccgggcgttccaaccagtttgcggtgtttatcgactccaccgggcgcagttattcggtgccggctcacaccttgccatccgcacgggggcagggcgagccgttgaccgggcgcctgacgccgccacctggggcgaatttcgaatgtgtgctgctgccggacgatgatgcgctatacgtgatcgcgtccgacgcgggttatgggttcgtggtcaagggtgaagacctgcaggccaagaacaaggcgggcaaggctttgctgagcttgcccaacaacgccaaggtgatcctgccgcggccggtggatgatcgtgaaagcaactggctggcgtcggtgaccaccgaagggcgcctgctggtgttcaagatcagcgacctgccgcagctgggcaaaggtaaaggcaacaagatcatcggtattcccggcgagcgggtggccagtcgcgaagagtacgtgaccgacatcgcggtgatcccggaaggcgcgaccctggtgcttcaagccggcaagcgcaccttgtcgctgcgtcctgatgacctggagcattacaagggtgaacgtggtcggcgtggcaacaaactgcctcgaggcttccagcgagtggatgccctgctggtagaagcgccggtttaacgcgttttagagctctcgatctacgatttaacgcgtagatcgacgctttggcgctggagtcatggcgcatattcacggatgatatggcctttccagcgccggcgtggccgagcgtgtttaggttatttttagtattacattgtggtttgccttgtggcagccacctggatgggatgatgactgctccacgccttccttttattttcatgctcgctggccttttggggttggcgggttgcagcacccatcaaccggtgtcgctgtaccagctggacagcggaagtccggctcaacctgcacagaccgccggcatggccgttttgctcggcccggtggtcgtagccgactacctgcaacgcgaaaccctcctgcaacgtcagaacgatggaagcctgcaaggttccaccgatggtcgttgggcggggagtttgtcctctgatatcaaccagttgatgttgcgccaggtggcgggtcagttggacagccagcgtgtggtcctcgcgcctgcacccaccggttttaccccggatgtgcaggtgttgctgaccattacccggctcgactccggtgcgtcgcaaccggcaatcctcgacgcacaatggcgtttgatcgaccgtcgtggccaggtgcgcgataaccgcatcgtgcatttgcaggaacagcacaccggctccactgcgtcccaggtccaggcccagggcgtgctgttgcagcatttggcgcagcagttgtcggtggcgctcaagccattggccaaccagccgccgattgccgaagcgccgcgcaagcagagcgccccggcgcaggccaagccggccgctccggaaaagccgaagatgccaatggcgacgccgatccgtacggatatggaagtgttcaggttctgatctgaatcgcgcacaaacaaaaggcccgctgagtaagcgggcctttttgtttgtgcgcaatttgagccaggctgcggacccaatgtgggagggggcttgcccccgatagc

SEQ ID NO: 65 - DNA, 180795 bp, Pseudomonas nodulensis
cgttgagctaaccaatactaattgcccgtgaggcttgaccatataacacccaagcaatttgactactctaacgagcatcagattgcggtgtgtgaagacgaaatgaaccgaaagttcgacgttcacaaaacaccgaaagctgtcacatacccaatttgctgaagcgaggcccaggccacgactcagtacccgaatttcttgacgaccatagagcattggaaccacctgatcccatcccgaactcagtagtgaaacgatgcatcgccgatggtagtgtggggtttccccatgtgagagtaggtcatcgtcaagattaaattccagaacccctgactgctaacgcagtcaggggttttgttttgggcggtagaaaactcgagcgctacttatcccccgacaaatttgcacagttatttctgaaccagagcactagaataggcacctaaccatttttagagtcagagccctatctatgcccgatccggctgatgccctcgagctatcggatttaccactggacgacctggtggcatgccatgagtgcgacttgctgatgcgcaaaccggtgctcgccctcggcgaaaaagcccaatgcccgcgttgcggttacgagctgtacgctcaccgccacaatgtcgttgagcgaagcatcgccttggtgctggctgcactgttgctgtatatacccgcgaactttctacccatcatgcagctcaatctacttgggcagtcctccgaggacaccgtgtggagtggcgtcgttggtttatttgacactggcatgcaaggtgtcgcggttgtcgtttttctatgcagcatgggcatccccttgctcaagctgctttgccaattggcagtgctgctcagcatccgctggaatgtcgggcgcagttatgggctgctgctgtatcgcatttaccatcacatgaaagactggggaatgctggaggtctatttgatgggcgtattggtggcgatcgtaaaactcgccgacatggcctccatcacgataggcctggggctggtctgttttatcagcctattggtggttcaggtgttgcttgaggtggtgatgtcgccccaccagatctggcaagcgctatcaggagaggatgatcatgcgggcgattgatgcaggcattctgatttgtaccgaatgccacgagttgaacaaacaagacgctgatagcgacgagcaaacctgcacccgttgtggagcgctgatccatgcccgtcgccccaacagccttacccgtacctgggcgctgctgatcaccgcggcgatcttgtacattcccgccaacctgttgcctatcatgaccatcaattcgcttggtcagggcgaccccagcactatcatggccggggtgattcaactggtgcagcatggcatgtaccctatcgcggctgtggtgttcatcgccagcatcctggtgccaaccttcaagctggtcggcataggtctgctactgttctcggtgcagcgtcaccaaccgctatccgcgcaacaacgcattgtgatgtaccgcttcatcgaattcattggtcgttggtccatgctggatatcttcgtgatcgccatcctggtggcggttgttaactttgggcgacttgccagtgtcgaggccaatctcggcgcggcggcgttcgccagtgtggtgatcttgacgatgcttgccgcagtaacttttgatccccgactgatttgggataacacggagtcggacgacgaccatgagtgatttgcctaaagctaaaacccgcccagcctccaactggtcggccatttgggtgttgcctctgattgccctgatcatcggtggctggctggggtggcgcgcctattcccagcagggcatcgacatccaggtgcgctttgaaagcggcgaaggcatccaggtcaacaagaccgaagtggtttacaaaggcatgccggtgggcaaggtcaaggccctggccttggatgacgagggtaacaatcgcggggtgattgccaccatcgagatgaacaaggacgtcgaacaatacctgaagaccaatacccgtttctggctggtaaaaccgagtgtcagcctcgccggcatcaccggcctggaaaccctggtgtcgggtaactacatcgctgccagccctggtgacggtgagcccacgcgcaagttcaaggcgctctccgaagagccgcccttgtccgacgccaagcccggtttgcacctgaccatcaaggctgaccgtctcggttcgctcaaccgtggcagcccggtgttctacaagcagatccaagtgggccaggtcaaaagctacctgctctccgaagaccagagcaccgtcgagatcaaggtctatatcgaaccgacctacgccagccttgtgcgtaaacacacacgtttctggaacgccagcggcatcagcatcgatgcgaatctctccggcgtgaaagtgcgcagcgaatccctctccagcatcgtggcaggcggcatcgccttcgccacgccggagaaccgcaaggacagtccgcctacggatccgagcctgccattccggctgtacgaagatttcgacgccgccgcggccggcatcaaggtcaaggtcacactctccgacttcgaaggcctgcaggccggccgtacacccgtgatgtacaaaggtatccaggtcggcagcctgaaaacgctgaagatcaacccagacctttccagtgctaacgccgaactgacccttgatcccctggctgaagattacctggtgcaagacactcagttctgggtggtcaaaccgtctatttccctggcgggtatcaccgggcttgaagccttggtcaaaggtaactacatcgccattcgcccaggtgacaaagggacgcctccacagcgtgaatacgtcgcacgggccaaggcaccaccattggacctgcgttcccctggcctgcacatggtgctgttcaccgacaacctcggctccctggatgtcggcagcccgatcctctacaagcaggtcaaggtcggctcggtgcagagctaccagttctcgcgcaagaacaagcagttggtgatcggtgtccacatcgagaaggaatatgaaaacctggtcaacggttcgacacgcttctggaatgccagcggcgtcaccctgaccggtggccttactggcggcatccaggtgaagagtgaatccttggccagcctgatggccggaggcatcgccttcgaaacacctgagcagaacgttccgctgaaaaagcgcatcccgcgtttccgcctgtttgccgaccgcgaggccgccaaccagcacggtaccctggtgaccatcaaggtcgaccgcgctgacggcatgcgccctggtacaccggtacgtttcaaaggcctggacgtgggcaagatcgaaagtgtcgacctcagcgccgacatgcaatcggtgctgctcagtgcgcgtatcacccaggtagcggatcgtatcgcccgcgtcggcagtcagttctgggtggtcaagcctgagctgggcctgatgaaaaccgccaacttggaaaccctggtcaccggtcaatacattgaagtacaaccggcagcaaaaaacgccggcccgcagaagagtttcgtcgcgctagcccagccccctgaagccgcccatcaggaagccggcctgagcctgacactcagcgccgcccgccgtggatcgttgaaggagggcgtaccggtcacctaccgcgaagtcaccgtgggcaaagtcactggctacgagctgggccaaaccgccgaccgcgtgttgatccacattctgatcgagccgaaatatgccccgctggtccgtggcggcagccggttctggaacaccagtggctttggcctcgacttcggcctgttcaaaggcgcaaccgtacgcacggagtccttggaaaccctggtcgccggcggtatcgccttcgccacacccgatggcgagcgcatgggcaatgccgcccggccacagcaaaccttcccgctgttcgacaagtttgaagatgagtggctgacctgggcacctaaaatcccgctcggcaaataagcgccacaaaaaaggccgcgatccatagatcgcggccttttgcatttcagcgcagggcgtcagacttcatccagctccggctcatccgcctgcacattcatcgtcgccttcaccacatcatgacgacggatgtacttccagtccgcctcatcgatgtagatcccattcggcccgctgccaccttccaggtcgatcgccacctgggcggagacctgcggcttcacactggccaggatcggtacgaagcccagctgcaagctggtctccaacagggcagcctggttcttctcatcgatgtccgccgcttcgtcgaggtagtacggcaagcgcacacgcccggcctggtcacggtccatcaagtgcagcaacaagtacatgttggtcagcgccttgatggtcatggtggtgccgttggacgcggcgccatcgatgtcagtgtgaatcaccggctggccatgcactttggtgatctcgaacgccagctcgaacaagtccttgaggcccagttggttatggttggccgccaccagccgcgccaggtactccttggcttcttcgttcttgttgtcctgctcggcgctctggctcaggtcgaacaccgacagggtttcgccttcttcatactgaccggcgctgtggatgatctggtcgatatgcttgagcgcttccttgttcggcgccagcacgatgcggaagctttgcaggttggagacttggcgtttgttgatctcacggttgaacaacgccagttgatgctcaaggctgtcgtagtcgctgcgaatattgcgcaaggtccgtgcgatatcggtgaccgccgcacggcgggctttgccgagtgtcagcgcttcatccgtgcggtgcgcataagcgttgatcagcaattgcaggcgacgctcgacatcatcctcgctgtcgaacttggccacgcccttgaggcgaacctgggcgtacagcgcttcgatctggccatcggcgcgcagcaaaccttgccagctgtcctgatagtcattgagcagcggcagcaggttgtccatggagtcgtcgaccgggtccatgaacggcgtgccgaacggcaagtccgccggcaacaattgacggcgacgcaacgcgtcgtccagcgtacgttgcttggcttccatgtcaccgatctggcggccgaccaattgcagcttggccgacagttgctgaacacgctcggtgaacgcatcactggaacgcttcaactcatcctgcgccgcttccatctgcgccaggttttccagcttctcgccttcttcggcgctcagggtttgcgcacggcggaagtcttcaagggccttttgcgcatcgagcacctgctggtacagcgcttcggtctgcgtcttgctcgcggcacggtcggaggcgacagcctgttgggttttcagctgcttgagttctttctccaggcgctctttctggtcgcgcaacgccgcgcgatccgccagggcctgcaaggccggtggttcgatgtgggagatgtcgatggacagccccggtacttcaaagcgctcacccttgaagccgtcgagtatctgctccagggatttgacccactggccgtcctcgtcaagcgtgatgccatgttcgcccaacggcaggctgaacaacgaactgttgaacaggcgcatcagacgctcgacgtcctgctgtgagaattcctcacgcagtttggcgtagctgttgttgtcggcgtggtcgagttgttgcttgaccgacttcaagcgcttttccaggtcgcgcaggcgctcatccagatcctcggcgctgaactgccgcgactgcgcaagggcacccgccaactcatcgtgggcatccttggccgccagcaactgctgctccagcaccttcacgtcatccaccagcgcaaagcgatgcttgagcaccgacaactcgcccaaccaacgctggataccgctgatttcccgctccaggcgcatcagctcctgggtgccgccacgctgatcgttctgcagcgcgtcctgctcgttgcggtagtgttcggcctgaatcgtcagttcttccttgcgtgcactggcgtagtccgaccaggtgcccagcaacgagtcgagcaatggcgacaggcgatgcaatttgccacgcagcacgtcgcgctgacgaacaccattggacagcgcttcaaccagagggccggccgcgaccagggagttgtagtcctgctccatgcgtcgcacatcgcggaaggcttcttcgcacgccgcgatgtagtccacgctacccgaacgcaggctgtgctcaaacgcatccaggaacaattgcttgagcttggccgcggtgatttcacgcatgtgcagcaggttgataaacagtgcgcggaaggtcttcaggctctgctcgctggtggagcgcagtggaatcaacgtcaggtccagcgggatcgacgtatgcccgcccaccagcaagcggcgcagttcatccggcttgagttcgtaggctttcaggccttcgcgctcgaggttggtgaacagctccttctgacgcaggcaggtgtcattcttctggtagtgcgccaggtccagcttgccggcataggcaaagaactggtgaccgaaaccaccgcccgggccgcgcccgaccacgccgattacatgggggccgtggggcagcgagacttccacgaggatgtagctggtgtcggtggcgaagtagaagcgccgcgattgttccagggtgtacttgccgaaactcatgtccgacatgcgcgccaggatcgggaactgcaaggcgttgatcgaggcggatttacccaggttgttcgcgccatacacggacagcggctcttccagcgggaacaggcccaggctgtagccggcggtgttcaatagggcgaagcggcggatgccgtagcgttccttgctcatgcatcggtctcctgttcttcggcaatggcgcgggccagggcgtcttcttcgctttcatcggcgaagtcgctcaagtcgagtgggtcatcggttttcagcaatttctcatcgctgtcttcgtcgatgatcaccggtgccggcagcggcaacacgctgtgcacgctggctgccaggtcgcggtcttgctgcaccgacaggcacacatcgaggaagcggtgcatcggcggcaggaagcgatagatgccgttgtcttcgctggcaaaacccagctgggtcatgcggcgcatgattttttcttcgagttcttcctgggtctgcacctcggcctggataaacaggtcgcggtacttctccagcaacgatggcagctcatcacggccgaggctgccaccgtcaagcacggcgatcgggtcgcggccctggtcggccaggtgctcgacgatgatgaaggtgaacagcgccaggcgctgggcggtcttgttgacctgcgcggcggccacggcagtgtccggcacgaagtagtagaagccccgcgtgtcgcacaccagctcgaagcccagggccttgaagagcgtgcggtactggtcctggaagttcgacagctgtgcgtacagctccgggtcgcggcggctgacgtggtaacccttgaacagctcgcgaaagatcggcgccagctgggacagttcggatagatcaagatgcatgaggtgtactcgcagggtgctcggcggcgtcggatccggccgggagcagggcgaatgagcgcaggctgacctggtgctcgtgtgtgtggtaatcgcggcgttccaggcgttcgcgcttgaagcgtttttcccgcgagagccgcgagaaccagtacagcaattcgtcggtggcgccgtccggttcctgctccagcagccaggtcatcaggtccggcatcggcagcgcgtcttcgcagcgctcaagcatctccttgaccgtgcgcggtgcacgctgggcgtcgcccttgtgggacttgtgcgccttgggaaagcgcgccggtttcggctcgaaattcgccagggcatacacataggcttccacctggctggcgctgccgaggaaggtgctctgcggccgggtaaacatcggcatcgccgcttgcggcactgcgtccaggcctttgcggcgaatggccgacaaggccagcgccgcaccacgggtcacggcgttgtgccgacgcgcttcttcacgcagcggcagcagcagttcgcgggcatgacgcaaggtcaactgggcgctggtctgcatctccaggatgcgcgcgtgggtgcgcagcaacatgtcgtcgtccaccaggtggccgaggcgctgctgttcggtgagcatgcgcagcaacacattttccaccttgcgcacgccttgttcgaaggcgccgtcggcgttcaccagctggatcatcggttcgacgtattcgtcccaggtcgccaggacctcggcataacgctggcgcaacgggatctgccggtcgctggtcttggcgcggtcggccacggcggcgagggcctgttcgtcgttggcgagttttttcagcacatcgcgcacgcgcatgtcgagcaggcgcagttgacgggccaggtcgtggccatcgcggatgtcgaaggcgtcctggatgtaaccggccaggcgctcgaggtggcgcaggtaggcttcgatttccaggcacaggccaagccggtgctccttgcgaagataagccaggaagtcgtggatctgtgcgttgagctcgaaacggttcgggctcttggcgacaggcaccaggatgtccaggcgaatccacacgtccagcaggctggtgatgtcctgtggcgtgctgtccagttgttgggcggccagttgtgcgcgcagttcactcaggctcagggtgccctggtcgaagtgttcgcacagtggctcaagcagggcccagtgttcggcgagggcgcgcaagacgcgcttgggttcgatcatcggaatggccagctggttggcgattaaaagtcgcgattgtactgcatcggacgcgggatttatccacagccggtcagtacgcagtgggcgattgttgccgaacagcggtagaatccccgctctttagttatccacaagtggccgagctgtgcttatcgagtcccgacgtcgcgcttacttgaccgccatgcaggtggtcaactggctgccccgcaccgaactgccgtttgccgcgccgtcgcggcccgagctgttgcaggcgcttgagccctatgaggcgttcgagtcttcgggcgaggaagcggctgcgccggtggctgtggtcaagcccacgccggaggcgcgaccggtggtcgaacgggccaagatcgaagtgccgcgccccgcgccggtgaccaaggccgccaaggtggtcgaagagacggccccggtggtcaaggccccggtggtgccgccaccgcgctttgccctgcaattgctgcgtgccgggcgctgcctgctgctggtggagttgcccaccggcgaacgtttccagacccgcgaccccgcctacatgctgctcaaggacatgctgcgcgccgccggcctgcccgacagcccgcaaatcgtcggcgacccggtgcgctggccgctgctggtgcgtggcaacatggatcaaggccccgaggccgcacgggattttgtgcaaggttttgtgtctgcgcgtctggaagacgagccttgcgcgtgcctgtggctgatcggcctgcctgccgtgcgttttgccggcgaggccaatgccgaagcctggtaccgcgagttgcaggtcgaaagcctgggcttggtgtgggccttgccgggcctggaattattaatggaagagccacagcgtaaggctgatgtctggcaagccatgcgccggctgatggcgcgctggaaaacaaccgatgagtgaggctttatccttccgcccgatgaccgaggccgacctcgacgccgtgctgaaaatcgaatatgcggcgttcagccacccctggacccgtgggatctttctcgatgggctgggcaaataccagatctggctgatgtttgaaggtgagcagcaggtggggcacggcgtggtgcagatcatcctcgacgaggcgcatctgctgaacatcaccgtcaaaccggaaaaccagggacgcggccttggcctggcgctgctggaacacctgatgtcccgcgcctatgccgccagtgcgcgggagtgtttcctggaggtgcgcgacagcaataccggcgcgtttcgcctgtatgagcgctatggcttcaacgagatcggccgtcgccgggactattacccggctgtcggtggccgcgaagatgcggtcgtcatggcctgcaccctggtcgactaaatacataggccattgtgggaggtggcttgcccccgatggcggtgtaccaggcaccttatcagtctgatatgccgctatcgtgggcaagccccctcccacttttagggcacgttttgtcagcggttaccgtctactggatcaatatctgccaattcggcctcatccaggccattgcccccaccgatctcatcctcatcgacgatactcaggtcccagtccgccggttcgctttcgcccgcttcctgagcatcccgtgctccatcttcatggatcagcgtttcagggctcatgtcatcgtccgtcgcttcatggtcttcggttgaagccccggtcatcccggcctcccgcacccgttcgtcaccgatatgcgtggtgggcgcgtcttcttcaaaatccagctcacgcatcgagcccatgcgatcttcattatcatcaatcggttcgggctgtgtagcgccgtagggacgtcgtgattcagtcatggccaatcctcatactgtggggcttatagtgtgtggacaggcacggagggctaaagattcaagctgattcgtgctgagcgtgacctggacgcggggttgtcagtcacaaaactgcgcatcattcctgaggctttccctgatgaacgaactacaagacctgcttgataacaatgaacgctgggcggacgcgattaaacaggaagatcccgaattcttcgccaagctcgcccgccagcaaaccccggaatacctgtggatcggctgttcagacgcccgcgtcccggccaacgagattgtcggcatgctgccgggtgatctgttcgtgcaccgtaacgtcgccaacgtggtgctgcacaccgacctcaattgcctgtcggtgattcagtacgcggtggacgtgctcaaggtcaaacacatcctggtcaccggccactatggctgcggcggcgtgcgcgcctcgatgcaggaccgccagttcggcctgatcgacggctggttgcgcaccattcgcgacctctactacgagaaccgcgacctgctggcccagttgccgactgaagaagagcgcgtcgaccgtctttgcgagttgaacgtgatccagcaagtggccaacgtcggtcacaccagcatcgtgcagaacgcctggcaccgtgggcagagcctgtcgatccacggttgcatctacggcatcaaggatggccgctggaagagcttgaataccaccatcagtggtttcgaacagttgccaccgcagtaccgcctgcgtccgctgggcgaagcctaagatcgtttacggtcgcgccactgagccatgaacgcctgcccctcggcgttcagcggctcatcgcgaccggtaatccagccccggcagttcaactcgccgcattggcaggcaaactgttggaacagcacgtcttcggtgctggcgtaatccatggtcagcagggtgccggccatgatctcgtgcaaggtccagacctccaggtagtgcaagtcgagaaacacgttcggtttgcacgagtgcgacagcaggccgctgaaccagcagtcgtagaggtggatgcgcgacgaaagctgcaaagtgtgcaggcatcgctcgctcagggcatagccggagatcttggcgatgcacacgcggctgtcaaaggccatgctcgccttgattccgacgcccacgccagcaatgttgtgcaccacctcgaattgcttgcgagttgggtagccttttccgagtttggacttgaaagggtaaaggcagtcactcgcagcggttttagccttatccatggcctgagttttcataactctcctggtttaggctgcatcgacctgcgggtggtggctgactaccagtcttgcagcggatgggcgcggctcaagactcgctgaacatggagccgatttctactgtcaatgttgacagtagaaatcggctgttttttgtgtgatttacagcgccggcgcactgaccgtcggggttggggccgcattgcgcagctgtttcaattgggtcttgatggtgggcgtagcgcacttggcattcgcgtcttgcggggaaagattgcgcaccgaggtgtagaacagctcgcacgtctgctccttgcgcgtgacttgccaggtattcatgcaggccttgagcaagacattcggatcgctcgcgggtttctggcccatcccggcctgccagcaggcggcgctcaggtcctggcccatgaccttcaagccggcctcgtcggctttctgttcgttgccgtcgtaggtgtcggggctcgcggcataccagatgtaactggggtggttcgatcccagcaccgaaacggtttggccggcggcggggctgatctgcgccaggcccagcacgcctaccgtctgcccgtattgttgcttgatccagctgcgcaccggtgcgccgaacgccaccatcggcaacgcccctttggccggcaggctcaactcccggaccatgcgcgtctggtagtcggtgaagtagctgtagacggtttccaggtccttgcctgcattggacggcgcggcgatgggcgcgatatcgatgatggtctggtaagccggcgtttcggtggccgggatgccattgtcggtcaacagggtagcccagcggtcggtggtggccgattccaggtagttctgggcctgggtcagcgagtagtccggcgggaagtgcagcagctcgatgcttttgcgattttccagggccatgcccagcggcaggaacaggtaccagttgtaggcccatttaccatcgctgttgagcttgctggcgccttgataggccaggtcggcggtattgagcagggtggtcagcggttggccataactgtccggcacgccgctgaaggtcgccgatacctggccgtcatgggtcttgacgctgactttcgcccggctgtacccgtcccgttgcaggctctggttcaagtaatgctcggcagtctgttccagcgtccagggccgaaagcagatcacattgcagttattggggaatgcgaacagctgagtcacgcgctgcgtgctccccagcggcacctcgatgtcggcctgtaccgccgcactcgccatcagtgcggccagggtgaaggacagcctggttggtttgaacatggttgtttccttgtcagcgaaagcccgtctgcgcggggtgaaagcccaccccaacacagtagcggctgaccaggaaaaccgcgtgctaaatcaccgggcgtgtcgctattggataagaaaacctacacgctgaactgcaacgcgttgctcaagtcgcccatgggtttctgtccgcgggcgatcatcgcgtcatcgcgctgcttgagaccgtccagggtttccagctggaacacccgggtgatcaggcgcaggatcgacgcggtgtcgtacaccgtatggtccaccgtgcctttgcgggcgaacggcgacaccaccagcgccggaatccgcgtgccagggccccagcggtcgcccttgggcggtgccacgtggtcccaccaaccgccgttttcgtcgaccgtcaccaccaccaccatgtttttccactgcgggctctcttgcagcaccttcaaggcacgggcgatatggcggtcgcccgaggcgacgtcggcatagcctgcgtgcatgttcaggttgccctggggtttgtagaaggtcacggcgggcagcttgccagcctgggcgtcggcaaagaacttgttggtgctcgactcgtcccccaaaccgccatcgcgcaggcgcttgtcgcgctcggtgcggttctcggggccttgctgcttgaagtaattgaatggctggtggtgatactggaagttcgggattttcggaataccgcccgaatccttgaactggtccagcgtcgcttgccacgcgccggcgtaccacgcccagtcgacgttcttcttcgacagcttgtcgccgatgtgttcgtgggtttgcggcaccagcacgttgggcaggtcaggcttggagtagtccgggttttccgggtcgcggatccaggtcggccagtacggtggagccagggtgttcacgccgtagccatccggggtcagcgcgctggggccgaactgcggcgggccggtcatcgcgctggcgggggacttgtccaggggcttgaggcgcgggtcggtcgggtcatcgctttgcagcgtggcgatctgcgccttggccaccgattgcgcggcattcgggtaaaacggcgcggtggcgctgatcaggtattggtgattgaggaacgagccgccaaacgccccctggaagaagttatcgcagagcacaaactccttggccacatcccacaggcgcagggcataacgactctgggtgtaatgccccatcaccaggccgccggagtcggcccaggcgacgaagttgtcattcttgccgccgttgatctgcatctggttctggtagaacacgtgccacaggtcacgggtgaccaggctcaggggcaggtcttcggcgttcgggcccttgagggcgaagggtgcgttgggcaggttttcctggaattgcacttcgctggggtaggtcaccccgtccaccgtttgcgggccgacttgcagcacgccgccccacgtcggaggcaggctggtcaacaagctgccatcgcggtcacgctgctgcgtgtcggcggcggatagcgccgacagcggtttctcaacacccgggaagtccgcaaacaagttgttgaaactgcggttttcggcgtagatcaccaccacggttttcacctgctcacgcaaggccttgtccaactcttgcggcgtcagcggccgcggcaccggtttgcccggtgcttcgctggtattgccgcaggcactcagggtcgcgccaacccccagcaccgccgcgccccccaggaaacgccgacggctggtgtcgacgggcggttgggctgcggaatcgggggaagggcgctcttcgtgctcgtcactcattgcgggggagtccttggcgagatgttgcaagatatttcgcaggacggtagcaatgcaatgtgacggaacgaagacagtgatttgaatcagaggatcacagcagacgcagtgccaactcgctgccggcgcgcaagtactcgacctgggccgtcaccgcgtccttgacgatggcctcgcccgtgtcggtcagcctggctttctttgcatcgatgacactgctctgcaacaactgcatggccacgtcgatcgatttctggaaggcggtcacgttgttgtgcaggccgaactccttgaccacagcggccatgcggcgatctgcgtcgtcgcgcaaggtcctgtattcagtgactgaaacgttgccgtcctggtaaatatcagtgatcaactcttccagtgatttggataggggcgtcatcggagtttccttggtgctaggtgagtaggagtccgagtcaggttaatcaacggtattggtgggtgaagccgggggttgccgttgtctggagtaggacaaccccacgcgttagatcagaaggtgcttttagggcatcaccggcggcaaatacttcaacgtcgtccccagcgcccacagcaggaacaacaccagcggcgtatgcaccagcaactgcacgaacgagaatccgatcaagtcccgtgccttcaaccccaatacccccagtagcggcagcatatagaacgggttgatcaggttcggcagcgcctcggcggcgttgtagatctgcacggcccagcccaggtggtattgcaggtcattggccacttgcatcacgtacggcgcttcgatgatccacttgccaccgcccgacgggatgaagaagcccagcaccgccgaatacacgcccatcagcagcgcgtaggtgtcgtgggacgcgatggaggtgaagaaggtcgagatatggtgcgccagggtctggccgtcaccgcccttgaccaccgtcatcagcgcggcgatcgagccatacagcgggaactggatcagcacgccagtggtggtcggcaccgcccgcgccactgcatcaaggaagctgcgcgggcgccagtgcagcagggcgccggtcatgatgaacaggaagttataggtgttcagccccgagattgcgctgatcgccggtttggtcgagaactcatggaacagccaaccggccgccagcaatgccagcaggatggtcagcaaggggctgtgctcgagccactcacccgggcgggcgggggcttgcagtttgggcaggttgaacgccgggtcgaccccacaggccttggcatcgcgggcgctgttcgggccgggtgcggtggcgtaggcgatgatcagcgacaccacgatcaacgccagcaacagcacgccggattgccacaggaagatggtatcggtgaacgggatcacccccgtgatcgacagaatcgacggcggcaggctcgccgggttggcctgcaactgagccgccgatgacgacagccccaacgcccacacggcgccgagccccagatacgccgccgcaccggcagcacggtaatccatgcgcagatccgtgcgacgcgccagcgcccgtaccagcaaaccgccaaacaccaaggataagccccagttcagcaacgaggcgaccatcgagatcagcgccacccaggccacggctgagcggccgttcttcgggatacgcgccaggcggtcgatcagtctcacggcgggcggcgagcttgccaccacatacccgccgatcaccacgaaggccatctgcatggtgaacgggatcaggctccagaacccatcaccaaaagccttggcggcttcggtcggtgcagcgcccatgcccagcgtcgccacggcgacaatgatcacggcgagggcggcaaatacccaggagtctggaaaccagcgctcggcgaaattggagcagcgcagggcaaatcgggcatagcggctttcttcgatagcatcggccatgagtctttcctcttatagttattagggggcaggcgattttccggcatgttccgctacggcctttgatatgggaatgcagttatcttcatcgatccatgaggaaaacaaatatatctgctgtgattgccatcattgggctcagctcataacctgcacgccattttgtttgtctgccgagcctctacatgactgccacctttcctacgcaggcgcagcgcttttcccgctccgactacaaaaccctgggcctggccgccctgggcggcgccctggaaatctacgacttcatcatcttcgtgtttttcgcgctgaccttgagccaactgttcttcccgccggaaatgcccgagtggctgcgcctgctgcaaagcttcggcatctttgtcaccggctacctggcgcgcccgctgggcggcatcctgatggcgcacttcgccgatcacctggggcgcaagcgcgtgttcagcctgagcatcctcatgatggcgttgccctgcctgctgatcgggatcatgcccacctacgcgcaaatcggttacttcgccccgctgatcctgctggcgctgcgcgtgctgcaaggcgcagcggtcggcggtgaagtgcccagcgcctggaccttcgtcgccgaacacgcaccgccccatcatcgcggctacgccctgggcttcctgcaagccggcctgacctttggctacctgctcggcgccctcactgccacactgctggcgcaagtcttcacccctgcagaaatcctcgactacgcctggcgcttcccgttcctgctcggcggtgtgttcggcgtgatcggcgtgtggctgcgccgctggctcagcgaaaccccggtgttcctcgaaatgcaggcccgccgccatgccgctgccgaactgcccttgcgcaccgtgctgcgcgaccaccgcgccgtgctgctgccggcgatgatcctcacctgcgtgcttacctccgccgtggtggtgctggtggtcatcaccccgaccatgatgcagaaaaccttcggcatgagccccagccacaccttcgccttgagcgccttgggcatcgtgttcctgaatatcggctgcgtactggccggcctgctggtggaccgcatcggcgcctggcgcgcggtgctggtctacagcctgttgctgccggcggggatcgcggtgctgtacgccagcctgatcaacggcggaatctggctgggcgcggcgtatgccgtggcgggcctcagttgcggcgtggtcggcgcggtgccgtcggtaatggtcggcctgtttccggcgcaggtgcgggtgtcggggatttcctttacctacaacattgcctacgcgctgtgggcgagtacgacaccgttgatgttgattgcactgatgccgaccagcccgtggatctgcgtggggtattgcgtggtgatgggggcggtgggggtggggagtgtggcgttgtttggaaaacgccacacgttggctgcgtcggattaagtcaagaagtgccaaagcaccagcgtccccaccagaccgacgactgagacaatcgtctgcaacaccgaccacacccagatcgtctgcttcaactgcaagccaaagtactcacgcaccatccagaacccggcgtcgttgacgtggcagaagaacaccgagccggcgccgattgccagcgcgaccaacgagctttgcgtcaccgccagcccggccatcatcggcgcgagaatgcccgccgtcgtggtggtggcgactgtcgccgaacccgttgcctggcgcaacgcaactgcgatcaaccacgccagcagcaggtacggcatgtgcgcgccttcggcgaccttgctgatggtctggctcacaccagcatccagcagggtttgcttgaggccaccgccagcgccgatggtgagcagcaagacggcgatgggggcgagggctttgcgcagggtgttgcccacgtcggccctaggcatgccagcggcccagcccaggcagattacggcggcgatcacagccaggccgagggcgatcagcggttcgccgagaaacttcaaggtcaggccgagggtgctttccgccggcagcgcgaccttggccaaggtgctgcccagcatcaggatcaccggcaacagaatgatcagcaacgacacgccgaagcttggttggcgcggcgccttgggcggtgcgctgaacagtgcgccgatgtccgccggttcatccacctgcaggcgcttggacagccagttgccgtagatcgggccggccaggatcaccgctggcaccgccaggcagaagcccagcaacatggtcaggccgaggtcggcgtgtaacgcgcccaccgcaatcagcggccccggatgcggtggcatcagggcgtgcagggtggtcatgccggccagcgccgggatggcgattttcagcagcggctggttcgaccgcttggccattacaaagatgatcggcaccatcatcaccaggcccacttcgaagaacagcggcaggccgatcaccatcgccacgagcgccatcacccacggcaatgacttgcccttgcccagcccgagcagggtggtggcaatgcggtcggccgcgccggattcggccatcaatgcgccgagcatcgagcccagggcaatgatgatcccggcctcaccgaggatcgccccggcacctttgctgaaggccttggcgacttcttccggcggcaggccggcgccgacaccggcgatgaaggtgccgatcaggatcgacaggaatggcggcaacttggtcgcgctgatcagcacgatgatgctggcgatggccagcagtacacaaaacataaggcgagtgtcgtgaaccatccacgcggcagtcgataactccaaggcgggactccttatcgaacaggttgggagaattgtttctttttgtttcctgcccgaaaagcatacctgataccgcgatagccaagtgcttatgtatcgttttggtgcgatcagcgacaggccgccgaaatgcccgccgcagagccattgctgtcggatttgtaatctttgctccaccgccctgataagtcgtgaccgctacattgccccggctagtatttcttgggcgtggaactctcgttatggcaatttccgttagaaaactcttgggggcgggggcgttgtggctggtcgctagcgctgcccaggcacagaccctcaccctcaattcagccctgcaaaccgccttcgccaataaccctgacctagcggccgcacaatgggaaatcgacatcacccagggcggccgccagcaggccggtttgatccccaacccggtgctctcctgggatgccgaagacacccgtcgcaactctcgcaccacctccatcaagctcagccagaccctggaactgggcggcaagcgtggtgcgcgcattgacgtggccagccgtgcccaggacgccgccgccctgaccttggaacagcgccgcaacacactgcgcgctgacgtcatcgacaactactacggcgcgttgcgtgcccaggagcgcctcgacctggcgcagcgttccatggctgtggccgagcgcggcctgggcgttgccaatggtcgcgtcgcggcgggcaaagcgtcgccggtagaggcaacccgtgcgcaggtacagctatcggaaatgcgcctggaattgaaccgcgcacaggtcggcctcaccgacgcctatcgccgcctggccgcgagtactggcagtgccggcgcggatttccaggtcgtcgccacacagccccaatccacaccgcccctgccgccggttgcgcagttgttgacgcgccttgagcagaccacggaactgcgcctggccgaactgaacatcctgcaaaacgaagccagcgtcggcctggaaaaagcccagcgcattcccgacctcgatgtgtccatcggcagccagtacgacgctagcgtgcgcgagcgcgtgaacctggtgggcgtatcgatgccgatcccgctgttcaaccgcaatcagggcaacgtgctcgccgccacccgccgtgccgatcaggcccgcgacctgcgcaacgccaccgaactgcgcctgcgcaccgaaacccgccaggcgctggacctgtggcaaaccgccaataccgaagtgcgcgcattcaaccagcagatcctgcccgccgcgcaaagtgcagtggacagcgccacccgtggtttcgagatgggcaagttcagctacctcgacgtgctcgatgcgcagcgcaccctgatcgctgcgcgcaaccagtacctcaccgccaccgcccaggccactgacgcctgggtgcgtatcgaacggatctacggcgacctcgcccggttttgattgtctttggagtcctttatgaacaaccgacacggtgtggcacttgccgttgccctgggcctgatgctgtccggcgttgcctgggccgatgaagaagaaggcgcacttgaactcaccgaacagcagatccaggctgccggcattcaactggccctggccgaaccccgcagcctcagcacgatgctggttctgccgggcgaagtgcgtttcgacgaagaccgcacctcccacatcattccgcgtgtggcgggtgtggtggaggcggtcaaggccaacctcggccagtcggtgaagaagggcgagttgttggcggtgattgccagccagcagatctccgaccagcgcagtgagttggccgccagcgagcgccgggttgagctggcgcgcaccacctttcagcgtgaacggcagttgtggcaggacaagatctccgccgagcaggattatttgctggcgcgccaggctttgcaggaagccgagattgccctcaacaacgctcgccaaaagatgagcgcgttgagcggcagcgcggtgctggtcggcggtaatcgctacgaactgcgcgccccgttcgccggcgtggtggtggaaaaacacctgggcgtcggtgaagtcgtcagcgagaccagcaacgctttcaccctctccgatttgtcccaagtgtgggtgaccttcggtgtgtttcccaaggacttgaacaaggtccgggtcggcaaaccggtcaccgtcagctccagcgaaatgggcaccgaagtgcagggcactgtggcgtatgtcggcaacctgctcggtgaacagacgcgcacggccaccgtgcgcatcagtgtgcccaaccccgacgacgcctggcgccctgggctgtttgtcagcgtgcaattggcgacggattcctaccaggccaaggtcaccgtcccacaggccgcgatccagaccgtcgaggacaaaccctcggtgttcgtccgcaccgcagagggttttatcacccgccacctggagctcggcgccagcgaaaacggctacgtcgaagtgcgccagggcctcgacgccggggcgcaggtggccacggtcggtagcttcatcctcaagtccgaactgggcaaaggctcggccgagcacgcccattgatcctgcgagtgattccccatgtttgagcgccttatccaatttgccatcgagcagcgcatcatcgtgctgctggcggtgctgttgatggccggtgtcggcatcgccagctaccagaaattgcccatcgacgcggtgcccgacatcaccaacgtgcaggtgcagatcaactcggcggctgccgggtactcgccgctggaaaccgaacagcgcatcacttttcccatcgaaactgccatggccggtttgcctggcttgcagcagacccgctcattgtcgcgttccggtttgtcccaggtgacggtgatcttcaaggacggcaccgacctgttcttcgcccgccaactggtcaacgaacgcctgcaagtggctcgcgaacaattaccttctggcatcgaaactgtcatggggcctatctccaccggcctcggggaaattttcctatggaccgtcgagtccgaggacggcgcccgcaaagaggacggcacgccgtacacgcccaccgacctgcgggttatccaggactggatcatcaagccacaactgcgcaacgtgccgggcgtggccgagatcaacaccattggtggcttcgccaaggagtaccagattgcccctgaccccaagcgcctggccgcctataacctgaccctgaatgacctggtcacggcgctggagcgcaataacgctaacgtcggcgccggctacatcgagcgcagcggcgagcaactgctgatccgggcgccggggcagttggcatctatcgatgatatcgccaacattgtcatcaccagctcggacggcacgccgattcgcgtgcgcaatgtggcccaggtcgagatcggccgcgaactgcgcaccggcgccgccaccgaaaacggccgtgaagtggtactgggcacggtgttcatgttgatcggcgaaaacagccgcagcgtgtcccaggccgtggcgaaaaaactcgaagagatcaaccgctcgctgcctaagggcgtagtggcggtcacggtctacgaccgcaccaacctggtcgaaaaagccatcgccaccgtgaagaagaatctcttcgaaggtgcgctgctggtggtggcggtgctgttcctgttcctcggcaatatccgcgctgcgctgatcaccgcgatggtgattcccctggcgatgctgttcacttttaccgggatgttcaccaacaaggtcagcgccaacttgatgagcctcggcgcgctggacttcggcattatcgtcgacggcgcggtggtgatcgtcgagaacgccatccgccgcctggcccacgcgcaacagcggcatggtcgcctgctgacccgcagcgaacgcctgcatgaagtattcgcggcggcgaaggaagcgcggcgggcgctgatcttcggacagctgatcattatggtggtgtacctgccgatcttcgccctcaccggggtggccgggaagatgttccacccgatggcatttaccgtggtgatcgccctgctgggcgcgatgatcctatcggtgaccttcgtgccggcggcgattgcgttgttcgtcaccggcaaggtcaaggaagaagaaaatatcgtcatgcgcagtgcacgccgagtctatgcaccggtgctggactgggtgatggcgcaccgatcgctggtgttcagcctggccgtactgaccatcgtcgcctccggcgttgtcgccagccgcatgggcagcgagttcatccccagcctcagtgaaggcgacttcgcccaacaggccttgcgcgtgcccggcaccagcctgacgcaatcggtgcagatgcagcagcagttggaaaaaaccttgatggcccaggtgccggaaatcgagcgcgtattcgcgcgtaccggtacggcggaaattgcttcggatccgatgccaccgaacatttctgacagctacgtgatgcttaaacccaaggaccaatggccggatcccaagaagtcccgggaaaccctgatcgccgatatccaacgtgccagtgcgattgtgccgggcagtgcgtacgagttgtcgcagccgatccaactgcgcttcaacgaactgatttccggcgtgcgcagtgatgtggcggtgaaggtgttcggcgatgacatggacgtactcaacgccaccgccggagaaatcgccgaggccctgaagaaacttgatggtgcttcggaagtgaaggttgagcagacctccggcctgccggtgctgaccatcaatatcgaccgcgacaaggctgcgcgctttggcctgaatgtgggcgatgtgcaggacaccattgccgtcgccgtgggtgggcgccaggccggtacgttgtacgaaggcgaccggcgttttgacatggtcgtgcgtttgtccgacgcgctgcgcactgatatcgacgggctgtcacgcctgttgattccggtgcccggtaatgcgtctggccagttgggttttatcgccttgtcccaggtcgccagcctggacctggtgctcggcccgaaccagatcagtcgcgagaatggcaagcgcctggtgatcgtcagcgccaacgtgcgggggcgggatatcggctcgtttgtcgaggaggccgaggccgcgctgatcgcccaggtgaaagtgccggcgggctactggaccacctggggcggccagttcgaacagctgaaggaagcctccgagcgcctgcgcatcgtggtgccggtggcgttgctgctggtgttcggcctgttgttcatgatgttcaacaatctgaaggacggcctgctggtgttcaccgggattccgttcgccttgaccggtgggatcatggcgctgtggctgcgggatattccgctgtcgatctcggcgggcgtgggctttatcgccttgtccggcgtggcggtgctgaacggcctggtgatgatcgcctttatccgcaacctgcgtgaggaagggcgctcattgtcgatggcgatcaacgaaggcgcgctaacccgactgcgcccggtgttgatgacggcgttggtggcgtccctcgggtttatccccatggcgcttgccaccggcaccggcgccgaagtgcagcggcccttggcgacggtggtgatcggcgggatcatttcctcaacattgctgaccctgctggtgctgccggccctgtatcagtgggcgcatcgcaaggaagaggaaacaccaggctgaaccgtgtgaaccggcccggctggctgctgacctcggcgtgcccctgatgcaggtgcatgatcgactgcacaatcgccaggccgaggccggtgccgccttcggcgcgggtacggctgctgtcggcgcggtagaaacgttcgaacaggtggggcaagtgatgggcctcgataccgcgccctgggttgccgaccgacagcgacacgttctggtcgtagctttctaccagcagcaacacgctggagtcgcagggggtgtggcgaatggcattggacagcaggtttgaaatggcgcgctggatcatcaagcggtccccggtcacccaggcatcaccgcgcaggctcagggtcacgtgcttgtcttcggcgctgagggcgaacagttccatcacccgttgcgcttcctcggccaacgacaccggggcaaattcggcccgtgccgccgggtgactgacctgggccaggaacaacatgtcggacacgatccgcgacagacgctccatttcttcggtgcaggattccaggctggccttgtactccgccgagggccgctcgcgggacagggtcacctgggccttgcccatcaggttggtcagcggggcgcgcagttcgtgggccagatcgtcggagaactgcgacagctgctgcaccccggcgtccaggcgatgcagcatgaaattgatgccctgggccagttcgccgagttccttgggcaggttgtccagggccaggcgatgggtcaggtcctgggtgctgaccttggccgccacccggctgaactgctgcaagggcgccagcccgcgttgcaccagccaccaggcgcccatgccgatcaggatcagcagcatcggcagggcgatcaccgtggagcgcaggtaggcactgagcagcgcttcatcgtcggaacggtccagcgacagcagcacgcgcacgtattcgcccccttgcaggggcatcaggcgcgtagcgctgagaatacgattgccctggccatcgacccagttcagataggccaggtttttgccggtgggcacatcgagtaacagcggttgctggggcttggcgccgacgctgaggagtaccggtgcatcgggccgtgcgccgatgatggtcaggtagatgttgtcgtggcccatcaccaggtccagcagtgaatgggggcggttggtgatgcggtgttcatcgaggccctggccgagggtatgggccagttgctccattttgttttccaggcccttgcgtgcgagcttgtccaactcgtgggtcagggccaggtacgccagggttgccagcagcacaaccaacccggcgcccatcaggctgacggtcaaccccaggcgcattgacaggctgctggtcttcatggccgcgcctccagcacataacccacgccgcgaatggtgtggatcaacttcacctcgctctggtcatcgaccttggcccgcaggcggctgatggagacctccaccacattggtgtcgcagtcgaagttcatgtcccacaccagcgagatgatctgcgtgcgggtcatcacctcgccgttctggcgcatcagcacgtgcaacagggcgaactccttggtggtcaggtcgatccggcggttgccgcggtaggcgcgatgccggcgcgggtccagttccaggtccgagacgcgcagcacgtccggcaccgggatgtgctcgctgcgccgcagcaaggtgcgcacgcgggcgagcagttcgggaaactcgaagggtttgacgaggtaatcatcggcgcccatgtccagacccttgatcttgtcggccagccggccgcgcgcggtcagcatcatcacgcgctggttgccgtcgcggcgcagttgctccagcacttcccaaccgtcggtgttgggcaggttcacatcaaggatcaccaattcgtagctgtgctgccgggccaggtgcaggccatcgatgccgctggcggcgcagtcgacgacataaccgctttcggtcaggccttgctgcaggtagtcggcggttttttgctcgtcctcaaccacaaggatacgcatggggagttaccttcatagaaaacgaaaaggggcatggcctcatggcgaggcgggggaggctgtaggaaaactctgaaccgtgaagtagctttagggtcaagccatgtcaggcaggtgcgacgattcgtcactgcgcctgcacacaaaaaaaacgccccgagcggggcgcaaaaattcatctctgttccaaaggagctacacaaaagccgcagagatgagatgtgttcggtgtgcagtgtagaaagtgcaacttaacaagagagtgagacgaatattacagttctgacagacttcaacctgtgaagagatgtagcgcatcggcaagtgaatgtaattggcctcccttaaagcactgcaattggatactcgataatcagcctaacttcttccaagtccgactcgaatgcacttgagcgcacggttgcctggcgcagtcgcagtgataagtctttcaagtttccactttgcaccacgtatttggcctcgatatcccgctcccagcggcgttgatcggtcagtggggtgccagctgcatcgcgacgcatgtacaccgcgttggcgttgctgtagtcggcgccggtgcctttgccgtagcgagtcatgaacgacaggccggggatgccgaatgcctgcatgtccaggtcgtagcgcaccatccacgagcgctccttgggtgagttgaagtcgctgtactggatcgagttgttgaggaagatcgagtctgactggcgcaggtagtcgaagtcgtcatcgccgttgttgcgctggtgggaaagggccaggctgtgggcgccgaccttcaccccgagcctggcgctccagatgttgttatcgaattcaccgagttttttccggccttcgtccaccgccttgtaatagttgacgtcgccgaacagcgagacttcttcagccagcggatagctggcggcgctgccgaggtagtactggtcccaggcgtctttcaagcggctgctgtagagactcacgctgaggtgttggttgacggtgtaatcaccgccgaaatagccgatccagggtgagtcgacgggcccggcgtagaaggtcgcgaagcctttgtccatgccactttcgctcggctggctcatgccgctcaagcgcccgccttgcagggtcaggccctcgaggctggtgttttgtgcggtcacgccacgaaagctttccggcaacacgcgtgaatcgccgtaggccacgaccggcgtcagcgggaatacgtcgccggccttgatgacggtatccagcacgcgcagtttcgcggcaccgccgactttactgtaggtgtcctcggggtgattttcgctgtctaccggcagcacgccgaacgaacctttgccgccgctgcggccggtgcccgagtccagctttatgccgaccatggcgaacgcatccacgccaaagcccacggtgccctgggtaaagcctgattcgaagcggccgatcaagccctgcgcccaggcctctgaatagccattgccggtggggctggactggcctttgcgatcatcgcggttgaagtagaaattacgcgccagcacattgaagcggctgccttcgataaagccctcgggcgggtcctccacggccacggcagccagcgggaaagcggcgcacagtgaaaggggaaggctgtaatgacggatacgcatggttcgctcctgggtgttggcagtttcagcttcttatgagagtgggcgttcttattgatttggcccgggctgatagttgcaaaccacagataacgaagaagtggcgcgaagattacaattctggaagctcacacttatctaacaaataagtaatgttctggtgaagatgacgtcagggtcagttggttagtctgggcactgaatttttcagtcgaggaactaatcatgaaactttataaattcgcgctgggtgttttaactgcaatcttgtcgttcggtgcgttggctgaaggtgggggggatcgtacgttcgcactgatgatggagcgtaatgaaaaagccatggccgactacgccgccaaaaagggcaagccggcgcccgaggtgcaggcctatcgctatggcatgaagctggacattgccaaggtggttaatgtcacgccgccgatccgctcgtgcaacccggtgccgtcgcgcatgacctatgaagactccagcggcaagctcaatacccttgagtatcaagtgatgggtgtgtgccgaaataacggtggctgatggatccaaaaaaatagtttggccagggcctgaagcccgcttaagaaaatgccggcagcgccgatgcaggtcagattcctctccctcatttgaccatcggtgccccatgttcaacacccgtttgaagcaggagctgtcggctcttcgcgaagaattatccagcttgaatcaggtcaaggagagcctggaaagtgaaatgctgtgcctgacgctggacgccgaaggccgggtggagtgggccaacgccaacttcctgcaggaattggcctaccagaatggccaactgctggggcgcgcgatcgaagacctggagccggcccacgtgcgcagggatgagttccagcaacgcttcaagaatgccctggtgcgcggtgaacatttcgccggcaccgtgcgcctgatgcggggcaatggccaggaagcctggctgcgctcgattgtgcagccggtgcgcagctccgatgggcgcatcaagcatttttcaatctattccagcgacctcacccgcaccatcgaggcctcccgcgagcatgaaaacctcatgaacgcgctggtgcgctctaccgccgtgatcgagttcgacctcggcgggcacgtgctgaccgccaatgaccgtttcctcgggggcatgggttacagcctggcgcagatccagggcaagcatcaccggatattctgcgagccggaggaatacaacagcaccgagtaccaggacttctggaagcgcttgaacgccggtgagttcgttgcggcccgcttcaaacgggtcgacagccatggtcgtgtggtgtggctggaagcgacctataacccggtgctggacgccaatgaccggttgtacaaagtagtcaagttcgccacggtcatcaccgatcaggtcaaccaggagcaggcggtcgcggaagcggcgaacattgcctacagcacctcgctgcaaaccgacaacagcgcccagcgcggcaccacagtggtgacccaggcggtggatgtgatgcgcgacctggccaagcacatgcagcaagccggtgacggcatcgaggcgctgaacgcccagtcccaggtgatcggtaccatcgtcaagaccatcagcgggattgccgaacagaccaacctgctggcgctcaacgccgccatcgaagccgcgcgtgccggtgaacagggccgtggttttgcggtggtcgccgatgaagtacggcagttggcctcgcgcactagcaaggccaccgaggagattgtcggcgtggtgcgtcagaaccaggacatggcccgcgatgcggttgccctgatgaccgacggtcgtttgcaggccgaacaaggcctggcgctggctgccgaagcgggcacggtgatcgtggaaatccaggacggtgcgcagaaggtggtcagcgcggtggggcagttcgccaaccaactgtcgagttgagcgtagggcttcaggtatcgtaggggctttctggtatgaagagtcgactgtccatgagccctacccaccgtcgccccgtccctctgtccaaggcctaccgcttgctcaaccatggccctacggtgctggtgagcgctgcccacaacggccagcgcaatatcatggcagcggcctgggccatgccgctggatttcgaaccgccgaaagtggcggtggtgctggacaaggccacctggacccgccaactgctggaaggcgccggcacgtttgtgctgcaggtgccttgcgtggcgcaggccgatctggtgcaaaccgtcggtaacgtcaccggtgccgacaccgacaagtttgccgcttacggcctgcaaacattcaatggcgaatacactcaggctccgctgctggaaggctgtgtggcctggctggaatgtcgtctgttgcccgagccgcataatcagcagacctacgacctgttcctcggcgaagtggtcgcggcctatgccgacgagcgtgtattcagcgacggccgctggcacttcgaagggcatgatcaactgcgcaccttgcaccatgtggcgggcgggcattttctcagcatcggccagccgattgatgggcacgcgctctaagccttgtcagcgcccgagcatcttcacccagcgcgacggcggcatgccgtaggtgctgcgaaattgccgggtcatgtggctctggtcggtgaagccggccatcattgccgcgtccaccagcgattggccctgggccagcaggctgcgcaccaggtccaggcggcgcatggtcaggtagcgataggggctggtgccgaacagcaggcgaaaatcccgcgacaaggcccagcgatcgcgaccggcgtggtcggccatttcatccagggtgatgctgcggcccagggcactgtggataaattcgcgggcgcgctcggcggccacgtagtcgaaggtcttgcggctgatgatcccgcccgagacgttgttcagcgcgtgggccaggtcgaacagggcgtcctgttcctgcaatgggtcgatggggttgtcgaggttctgcagcaacacctcactggcgcggaacagcctgggatcggtggacaggccgcccgcgataaacggcaacggcttgccgccgaggatctgctggatcagcgagggctcgacgtaaatcatccggtatttgaagccctcttcgctgccggcgtggccgtcgtgggtttcatcggggtgaagcaccatggtggtgccgggcacactgtggatcatgtcgccgcgatagtgaaagctctgcacgcctgtcaacgtacgcccgatggcgtaagtgtcgtggcgatgcgggtcgaaggcgaagccggcaaagtatgcctcgatgcgatccaggccactggcatggggcgcgcggtgcagccagtcgagggtggcggtgggtttgcccatggtgaggggtcacaaaaaagagagggaaatacgttaacccagtctgcatcccttgtctgccggggtcttgtacgattgtgcgagtggagtaggcaacgctcgactgtattatttttgtattgttttatgagtaattattatttttttacgataattttttcgctatcttgcctcgacattcctttcgagaggcattttatgaacacccaccgtcttgcccaactcagccagcgtatgtcgacgatcacactcctgttgatcatcaccatgctcgtgctcaatgctgctgtctggctgtttccggtattgagttcctctgctgatggactcgggtttggcttcgctctgagcgatcgtcagattcaagggcgcgtcgagcgggtggccttgttccccttgtggcaggttctgggcgccatcgtactgtccagcgtccccctgatggcactggcgtgtggcttgaatcacctgcgcaagctgtttcagaactatgcgcgcggcgagtatttctccagttcggcagcgttgcatttgggcaaggtcggcaaagcggtggcaatttgggtcttgctggattttttatgtgaaccgctgctgagtgtctgggtgacgatgaacgagccagtcggccagcgaatgatcagcctgagtgtgacggcccccagctttgtggcattgttcctggcagcctgtatcgcggtcattgcgcgtatcctgtggcaggccaatgaagtggattctgaaaaccgcacgtttgtatgagattcaaatgcccatcgtgattgagctggacgttatgcttgcccgacgcaaggtcaaatccaaggacctggcggcggctatcggaattaccgaacagaacctgtcattgcttaaacaaggcaaggtcaagggcgtaaggctggggactctggatgctatctgcgcctacctggattgccaaccgggtgacttgcttgtgcatattcccgcgcctgctgacgaccagtagccgcttatcaacatcgcaagagggaccgtccgatgctgttctccaacctgccgtacgccgcgccgttactgtcattggcgttgctctggaccgttgcggtagtgacgcccggccccaactttttcaacacggcgcaactggccgccagttgttcgcgccgccatggtgtggtggcatcagccggagtggccacgggtacgatcatgtggggcctggcgggtggcctgggcatcaagtcgctgtttacggcggcaccgatgctgtacctggcgttcaagatcatcggcggctgctacctgatctacctcgggttgaaactgttcaagcgctcttcaccgagcatgagccagaacgtgctgccggacgaagcccggcgttcgctgttttccgcgtggcgcctggggttgctgggtaatttgtccaaccccaaggccgccttgtttgttgccaccatcttcgcgtcaaccatgccgccctcgccgtcaccgatgttgctgaccctggcggtgatcaccatggccaccttgtcgttcagttggtattccagcgtcgccctggtgttttccagcgaacgcatggccacgctctacagccgatcgcgcaagtggctcgaccgctttgccggcggttgctacgtgttgttcggtgcacatctggtagcgaatcgctgacggcccgtggtaagaagccttacgttcaacagtgaggtcgggtcatgggcaaggtgcgggtaggtattatttttggtggccgttcggcagagcacgaagtgtcgttgcagtcggcgcgcaatatcgtcgatgcgctcgaccgctcgcgcttcgagccggtgttgatcggtatcgacaaggccggccattggcacctcaacgacacctcgaacttcctgctcaaccaggaaaacccggccttgatcgccctcaaccagtccaaccgtgagctggcggtggtgcccggcaaggccagccagcagctggtggagacttccggcggcggtctgttggaacatgtcgatgtgatcttccccattgtccacggcaccctcggcgaagacggctgcctgcaaggcctgttacgcatggccgacctgccttttgtgggttccgacgtgctcggctcggcggtgtgcatggacaaggacatcagcaagcgcctgctgcgcgatgccgggattgccgtcacgccattcatcacccatacccgcagcaatgcggcgcgtacttcgtttgaggctgcggtgaacaagctcggcctgccgatgttcgtcaaacctgccaaccagggttcctcggtaggcgtgagcaaagtcggcgacgaagccgagtaccaggcggccgttgaactggcgctgggctttgatgaaaaagttctggtcgaatcggcggtaaaaggccgcgaaatcgaatgcgccgtgctgggcaatgaacaccccatcgccagtggttgcggcgagattgtggtgagcagcggtttctattcctacgacagcaagtacatcgacgaccaggccgcccaggtggtggtgccggccgatatcagccatgaagccagcgagcgtattcgtcggttggccatcgaggcctttgaggtgctgggctgttccggcctggcacgggtcgatgtgttcctgaccgacgatggcgaggtgttgatcaacgaaatcaactcactgcccggttttactcgcatcagcatgtaccccaagctgtggcaggcggcgggcatgagctacagcgaactggtgagccggctgatcgagctggcgctggagcggcatgcggggcgcaaggggttgaagatcagtcggtgatgcgagcaatccacgaataaatcagtgtctttacttcctccgggtgatgcgtccttcggcggtaactggcaaaggtgggggaggtgcagtaagtgcacacctcactcacctcgatttgttcacgccggatgccggcagcttgcagcaacatcacgccatacccgctcaagtcaaaccacgcgcttgctgcttgcctggcgtggggcggtgcaatttgcgggggcaataacggtgcgggttgcgctgtgctccacggcgcccgcccggttgaccacaggtgcccctgatcagcctggaactgcgcaacaaacccctcgctcacctcatagcaacacggtttgatcgacggtccgatcgccgcgcgcaactggtcgactgcaattccttcgtcggtaaaacgcttgattgcattggcgatgatcccgctttgcagccccttccatccaccatgcaccgcagcgaccttttcgccgttttgcgcggcaatgagaaggggcaggcagtcagcggtgatcaccgcgatgggctgatgctcacctgtgcacaccccgtccgcctcaacggtattgggtacctggtcggcttgccactcgatcaccgaggcgctgtgcacctgcttgcagataaacacctctgccgggcgcagcggatcgttgatcgaacaaaaaccatgatcgacgccaggaatggcgccgagattatcggcctgatgcacgcgtgttttctccgttgattgaagtgttcagtcgccgaccgcttcgccttcgcgccgcgggtcggcgccgccgctcagcgacaccttgccctgggcatcccgcgtgcgaacgatggcctggatgccgctggtcatatcgatctcgctcagcgcatggcccttgtccttgagggcctgtttcagtgcagggctgaacaggccgctttccagctcggtcgcgccgttacggctgccgaaattcggcaggctgatggccgcttgcgggtcaagtttccagtcgagcatcgccaccagggacttgctcacgtactcgatgatttgcgagccgccgggcgagccgagcgtggccagcagctcgccgctcttgcggtcgaacaccagggtcggcgccatggccgaacgtgggcgcttgccaggctcgacgcggttggccaccggctggccgtccttctcggggataaacgagaagtcggtcatctggttgttgagcaagaaaccctggaccatcagatgggagccaaacgccgcctccaccgtggtggtcatcgacacggcaccaccctggtcatccaccgccaccacttgtgaggtggagatgcgcagcggcgagcgatccggcgcataagccacctggatacccgccggtacgcccggtttggcgatacccatgctgcgctcgccgatcaaggcggcgcgcctggccaggtagtccggtgcgacgaggcccgcgaccggcacggggacgaagtctgcatcagcgacgtagagaccgcgatcagcaaaggccaggcgaccggcttcggccagcaggtgcacggcgtcgggcgttggttcaaggccggcaggcgcggcgctttttaccggtggcatcgctgcgatgtcgtgggcttgcagcgcctgcaaggtgcccaggatctgcgcgatagcgatcccgcccgatgatggcggtggcatgccgcagactttccactgcttgtaatcggtgcacagtggggtgcgctccttggccgtatagcctttgaggtctgcctgggacaggctgcccgcgttgcgatggccttgcaccttgcgtgcgatctcatcggcaatcggcccttggtacagcgcgtccgggccttccttggcgatgcgtttgaacacattggccagcgccgggtttttcaacacggtgccggtggctttcggtgtgccatcggcattcaggaaatacgccgccatatccggtgactgcgggatgttacggtcagccgcgatcaggctgtgcaggcgcggagacatggcaaagccctgctccgccaggcggatcgccggctcgaacagcgtggcccattgcaaccggccggtcttcttgtgcgccatttcgagcgcgcgcagtactccaggcgtaccgactgagcgtccaccaatttgcgcttctggaaacgccatcggcgtgccgtcgcctctgaggaacaaacgctcggtggccccggccggcgcggtttcacggccgtcataggcgtgtacgtttttcccgtcccatagcatgatgaacgcgccgccgccgatgccggaagactgcggttccaccagcgtcaacaccgcctgcatcgcaattgccgcatcgatcgccgtaccacccatgcgcaacatttcgcgcccggcctccgccgccagcgggttggcggccgcggccatatggcgctcggcgtgttgggtggtgaggtcggtgcgatagccggaacccagctccggtgctggtggctgttcgttgatcggggtatgacaggcagccagggtcagggctgcggcaatcatcgacagttgacggcgggaaatcgaaaacacgcgctgaactccgttcattttgagaatgatctgttgtccttggggtagtgcgttttacaggtaaatcgtgccttgcaggtagagcaccgcgtggccggaaatgatcacgcgatcacccttgagctcgcagcgcagttggccacggcgcttgccgccctgttcggcggtcaaccggttcttgcccaggcgctcagcccagaatggcgccaatgaagtgtgggccgaaccggtcaccgggtcctcattcacgcccacattcggcccgaaccagcgggagacaaaatcaaaccgtgcgctcttggctgtcacggcgatgccgcgtttgggcaggcccttgaggcgggcgaaatccggggtcagtgcggcgacttgcgcttcgtcttccagcagtacgatgtagtcatcggtgctgaacatgtcggcctgttcaatgccgagcgcgctcaacatgccagcgggcgattcacagggttgtggttgcttggcggggaagtccatcgccagttcatcaccattgcgcgtcacccgcagctcgccgctgcgtgtggcgaagcgcaatacctctggcgcgtccgtcagttggtgaatcaacacccacgccgccgcaagcgtggcatggccgcacaggtccacttcgacttcgggggtaaaccagcgcaattcatagagttcaccgcgaggtacaaaataggcggtttcagagaggttgttttcggcggcgatggcttgcagttgctcatcgctcagccactcggtaagcgggcagaccgccgccgggttgccgccgaacggggactggctgaaagcgtcgacttggtagatgtccagtttcaccgtggagcactccgtgcatagaagggaggctggacactaacagtgggtcaagggagcgtcaaaatacagatggcgcctttttttgcgcgcaagtgcaccgctcgtaaccgcaatccatcgtcccggcacttttctccaggcataaaaaacggcctacctttcggtaagccgtttttagtacttggtggctacacagggacttgaaccccggaccccagcattatgaatgctatgctctaaccaactgagctatgtagccaagtggcgcgcattattcgcgtagaacggcaatgcgtcaagtatttattttgagtttttatctacgctttcaactgtttaagcgaaattaccggatcgggcgacgagtggttcgcgattcacccgtctgcacagcaagaaaaacctgatcgcgttgggcagatatccctgccgcccaacgcggggggctgatattaagggaacttcgcgttgtgagtggcgcgtttaagctgttcacgcgcccgggagaggcgcgagcgaaccgtgccgatcggaatgtccagtgcgtcggcggtgtcctggtagctgccgtcggtttccagtgaggcgtatagcgtcttgcgcatctctatcggcaggtggtcgatggcgctcaaggttttctccaggcgccgattgatttcaaattcccagtccaagttatggttctcttcctgtccatgccacagcgattcgtcgaattcgcaatgcacgggcttggcgtacagccgcctgaagtggttgcgtatgaggttttgcgcgataccgcacatccaagtgctgagcgtggcattcccgctgaaacgctcacggttgcgccaggcttccaggtacgtcaattgcagcaggtcgtctgcatcttcggggttgagtacgcgcttgtggatgaatctgcgaagttttttttgctggtcatctgtcaggtgaagcatgaattgaggcgagctgccaaccaggtgcgctaaagcttcaatagggatattcatggatttttccttggagtagacacagtcgaaaggtgtcgacgagaaccccgtttgcactggctgtgccaagcggaaaaattttttaatttattgatttatataaataaaaatcttgtattggtgcgattttgtgcaagtgtttgcagagggcgttgcaggcgcatgcaagttttttcaaatgtgcagtgggccgctagctgatggaaccgcttgggttggtcttgccacacaggtagacactcttcctgttcaggtccggccatgattgaattccattccgaactgccaaaaatccacaatgtggatcaaccagctgtcaatcagacttccacacctgctgccaccacaggcccggttaccgataacctggctctgctgttcaacgaggaagtggtcgccaacagccgggcgctgaatcaacggcagctcatcctgcccttggcatcagttcagatgctcaggcagatttataaccaattgggtcatcccgccaagaagaccttggcaatggccaaattgcagctcaagcagctactgcaagtacgtggtgatgttggggagttgcttggggtttgcggaggcgaccccacgctcacgtgtgttgcgctcaagaatttggaggcccaggggggcactgaagcagacttggcgcgcgatgcacgcatcaagctggaggctagtttcgcaggacagatccaggccggtctgaatactgcggctgcacttgaggaggggtgtcccgacctgcaagaacgcctggcggtgcgaatgctctattaccagagtgtggtttcgcaccaatccctggcgacgatgttgcagacgctgttggatgtatacggtgtggaacggtttccagaaggactcaaggtcatgcaaagagccttggcggacgatatcgccgccaaggtgtcttcatcgcccaatgcgtccctgcgtaccttgctcctgggcctgcaaagctgtgggcaactgagcggggtgttggcggcgtgtcaaggactgctccaacgactggctgtcgatcataaagcggtagtcctgctgcagcgacttctggggttcactggcggtggtgttggcgctgcggaaatcctgagatttgtagatgatttgcagggtggttcaactgcgcagcaattgctggtcctcaatgcacttttgccagtggtcgagcaattgccattggctttatggcccgatagtacagtacgtaatgaaaccctgaattgcttccgggtagtgatcggggagctggaccggattgcacgtagccatgcacgttttccacgtgagctggaggcccgggcgtgacgatgctgtcggtcatcaaccgctttctgctcaaggcggcgcagcgcgccgaagtgctgggcgcagtggtggtgatggccatcgtgttcattttcatcgtgccgctgcccacctggctggtggacattctgattgcgctcaacatctgtatttcgtgcctgttgatcgtgttggcgctttacctgccagggccattggcgttctcatcgttcccctcgattctgttgctgaccaccatgttccgtctggcgttgtcgattgcaaccacacgtctgatcctgctggagcaggacgccggcgatatcgtcgaggcgtttggcaatttcgtggtcggcggcaacctggcggtcgggatggtcatcttcctgatcctgacgctggtcaactttctggtcatcaccaaaggctcggagcgggtggccgaggtggcggcacgtttcagcctggatgccatgcccggcaagcaaatgtccatcgacagcgacttgcgtgccggcctcattgacggcatgcaggcaagggacaagcgagaccagttgtcccgcgagagtcaattgttcggggccatggacggtgcgatgaagttcgtcaagggcgatgctgtcgccggcttgattatcgtcgtggtcaacctgttgggaggcttcgccacgggcatgttccagcatggcttgagtgcttccgactctatcagcctgtactcggtgctgaccatcggcgacggcctgatcgcgcagatcccggcgctgctgatttctctcaccgccggcatgatcatcacccgtgtggcgccggatgggcgcaggggcatcacgaatatgggcgccgaaattgcccggcagatgaccagcgaacccaagagctggatgatcgcttcggtagggatgctggcctttgccgcggtgcctggcatgcctaccgtggtgtttatcctgatagcgctggtcactggtagcctggggtatttcctgatgcgccagcgccaacggcaggaacaacccactgctgaagccgcagaggcggtgcgccccgaagagaacggtcgtgaggacttgcgtgggtttgatccttcaaggccgtacctgctgcagttctctccggtgctgcgtgggacgcccgaggtgaccgatcttattcacgcgattcgccaggcgcgaaatgcgctggtcgccaatattggcctgacattgccaccgttcgaggtggaactcgatgacacgctggccgacgatgaaatgcgtttttgtgtgcacgaagtgccgatggtcaaggcctcggtcgtcagcctggttgcggttgagcgcaaggcgctcacggtcgaacccgcgcacgccataccggggctggcggagcgcgatgaacaggagtggctctggttggcgccggatgatccgctgctcgatgatccgcagttggagcgcttcaccgcggcgagcctgatcgtcgagcgcatgaagcaggcgatgatgcgaagcgggccgcagttcctggggatccaggagagcaagtcgatcctcagttggctggagcacaaccaaccggaattggtccaggaactgcagcggatcatgccgctgtcgcggttttcggcggtgttgcaacgcctggccagcgaaggtgtgccgttgcgggcggtacggctgattgtcgaatcactgatcgagtacggccagcatgagcgtgaaccggacgcactggctgactacgcgcgtattgcgctcaaggcacagatctaccatcagtaccgcgaagccgacggcctgcaggcctggctgctgtcgccgcagaccgaaaacatcttgcgtgatgcattgcgccagacccagaccggcgtgttcttcgccctcgacgaagagcatagcgcggcgttgatcaacctgctcaatcaagccttttgcgcacgcccgaaattcaagagcgtgatgctggttgcgcaagatttgcgcagccctttgcgcacgttgttggtggaagagttcaaccatgtgccggtgctgtctttcgctgagctgggcagtacttccaaggtcaaggtgttgggccgttttgacctgggccaggatgagctgatgcgcggtgcagtggcgtgagggcttgatgatgttcgagttacgcgtgcttgacgggctgcaccagggtgctgcgttgccgttgtttggggagcagtggaccatcggtgcccacagcgatgcagacctggtgctgagtgatcctggcattgccgagcggcatgcatgtctgtggctcatcgacggcgtttggtcggtgcaggccgaagctgggttgttacgcggggctgacggtcaggtgctggctcagatcgcgcgtctggcgctcaatggtgtgttttcggtgggaaacgtacggctgtgtgtcagcctggctgatgagccctggcctcaagcgcctgcgcctgcggcgccgcccgtgttcaatgaggcggcacggacacttaagttgtcgactatctcccactcccagcagaagcgcttgatcagcctggtgctggcgataacggtcatctttatcgtggtgggtatggcgtctacgggcgagcctgaggccaaggcttccttgatgccgcctgtggtgcgcaagcacgagttggcttcaccgttcgaggtgcgtcagcagctgttgaagatgctcaatgagcgcgagttgagccagcgcgtcaacttgcaggtgatcaatgggcaggtcgccctcgatggtgatgtgtcccaggatgatgtagagctggtcgcacgcatgctcaatcgtttcggcgagcaatttgacagcgcggtcccggtgatcagccgtgtgcgcgtgcgcgacgcaaccttgccgttcaagattgtgcagatcgtgggtgggcccaacggtcatgtagtcctggaggagggcggccggctgtttgttggcgatgaagtggagggtttgcgcctggtgctgatcgacaacagcaaagtggtgttcgatggcgtgcagcagtatgaggtgcgctggtgagcgtggaagtgcaggcacgcctcgaggcctggcagcagcgtcaggctcagtcgctggctaccttcgcgcctgtgacgatgcgggggcgcatccagcgcgtcaatggcatgttgttgcagtgccgactgccccaggcgcgtatcggggatctgtgccaggtagagaaaaagccgggcgactacatgctcgccgagatcatcggttttgatcagcaggatgccgtgctcagtgccctgggcaaccttgaaggcgtgcaggtaggcgccggcgtggagcgcctgggtgtttcgcatcgggtccaggtcagcgaggcactcctggggcaggtgctggatggtttcggacgaccgatcaccggtgatggccccagcgcctttgtcgaagccgacttgccggataccagcgcggtattgtgtgaggctcctttacccaccgagcggccacgcatcaaccgtgcattggccaccggggtgcgttcgatcgatggcctgctgacgcttggtgaaggccaacgcgtagggctgttcgctggcgcggggtgcggtaagaccaccctgctggcggagattgcccgtaacgtggagtgcgacgtcatcgtgttcggcctgatcggcgagcggggtcgcgaactgcgcgaatttctcgatcatgaactcgatgagcaactgcgctccaaagcggtattggtgtgtgccacctccgatcgctccagcatggaacgtgcacgtgcggcgttcacggccaccgcattggcagaaggcttccggcgcaaggggcagcgtgtgctgctgctgatcgactccctgacacgtttcgccagggcccagcgtgagatcggcctggctgccggcgaacccctcggccgcggcggcctgccgccatcggtctacagcctgctgccgcggctggtcgagcgtgccggcctgacccgtgagggcgtaatcacggcgatctatacggtgctgatcgagcaggactccatgagcgatccggtagccgatgaagttcgctcgttgctcgacggccatatcgtactgtcccgtaagttggccgaacgtggccattatcctgcggtggatgtgctggcgagcctttcacggatcttgagtaatgttgtcgagcctgcggatatccaggcgggtacagcgctgcgtcgcttgttgtcggcctaccagcagatcgagttgatgctcaagctgggggagtatcagcctgggagcgatgccttgaccgacctggcagtggacagtcgccaggctgtcgatggtttcttgcgccaggacttgcgtgaacccacacccatggcggcaacgcttgctcaactcaaggagctgacggcctatgtcccattctgatgtgctgctcagtgaagtcgagacgctgcgccgcctgcgccgtcaccgggcagaccgcgccgagcgcgccctgcgtgaagccaagcgagcccagcaggccctgcttgcgcatatccagcaggcccaggatgcacttgagcaaacccggcaggaggaggccgtgcaaagtgctcagttgctcagccaacaccaggggcaggtattgactcggcaggctctcaaatcctgggcggcgcaggagcgctcgttatctgccaatacacgtcgagacatagggcagttggaggccttgcagggccagcgtgacgctcagcaaacccgtgtcggcagcgcccagaagcaggtgaccgagtgcctgcggcaggtcgaaaaacttcaggagttgtcccttttattggtacaggagccgacatgacccaggttgcagataaacccgctgagcgtccacgcgtacgtgaacatcgagaggagcgcgagccgggaactcgtggtgttgtgcctgcggaattgacccggttgttcagccagttgtgggccggtgacggcaagggttctggctctggcacttccctgtcgggtgcgaaatcctcgggcagtgccgtgatgatcgaggcgcttgccgaacaactggttccgcgtctccaggccgcttcgcagtggccgcttcaggccgtgttgtacctgccgcgtctggggcggatcaatgccagtgtgcatcgcgaacagaacagctggagtatcgatctggacgcgcaagaggaggcgacggcgcgctggctcagtggcgtgcggcgacagtgtgaggatcggattgcgctgacgctggggcagccggtcagcctgtttctgcctaatgtcggcagcgcatgatagtgccgctgctgacattgccttctatcaagggcgacaccgctgccgcgcgacgccggctgggacgcggtttgggcctggcgtttgaagtggccgggcaagccggtcagttgcggctcgaacctggacgtgcccccgcaggtggccaggcgatgtgcttcgaaacggggtgtggcgtgctggccctcgccgaagcagggccgctgctcagcctgctgggtgaatgcccggtgacgttggccccctccggcaacgatccggattcctggttttgggcgctgttccagtttcacctgagccctcaggtgaaagccctgttgggctatgtgcgattgctggataccgaacggcccaaggcgtttggctgccggctaagtgtggccctggggaaaacccgggtcgaagggtatgtgtggctgaagcccgagagctttctggcgttgtgcgatgccggcccctggcgtgccacggccaggccgatgcccgcgtcgtttcagttggccattgccgtgaccctcggacatttgcagttgccgattgcgcaagcacgcagcctgcggaccggggatgtgctgctgcttgagaggatctttttcctagcccagggcagcggccatttgcaggttggcaaacggcgactgaatggctgcattgatgataacaacgggtcgttgtgcctgaccctgacttcaattgaggagacttctgtggatgaagaattcatagcccccgactatgccggtgatgagggcgacgagccagtgatggacgtattcggtcacgaaccgttcgatgaattgagcatggggctgaacgtacgctgcggcacgttgaacctgaccctgggcgagttgcgtaacctcgcgccgggcgcggtgctgggcattggcggttatgcgccaggcatggcaggcctctattacggcgaccggccgattggccagggacagttggtggaagtcgatggacgcctgggattgcagttatcccgcgtgatgtttggccgatgatacttcaggggttggaccccttagtcctggcggtgtttcttgcggcattatcgttgatgcccatgttgctggtggtgtgtacggcgttcttgaagattgtgattgtgctgatgatcacacgtaacgctatcggtgtgcagcaggtgccaccgagcatggccatcaatggcatcgcgctggccgtcacgctgtttatcatggccccagtcgggtatcagatcgctgaaagcgtcaaagtctccccccttgatctgagcaatgtgcaaacgctcctacagacgggaagcgaagccatcaaaccgttgcgtgccttcatgctgcgcaacatcgacccggatgtgctcacgcatctgctggacaacaccgcacgcctttggccggcgcagatggcccatgaggtgcagcgcgaagacttgatcctgttgattccggcattcgtgctgtcgcaactgcaggcagggttcgagatcggtttcctgatctatatccccttcatcgtgatcgacctgattgtttccaatctgctgttggcgctgggtatgcaaatggtctcgccgatgaccatttccctgccgctcaaattactgttgttcgtgatggtgtctggttggtcgcgtttgctcgacagtctgttcctctcctatctctgagtggcttatggaacccatcgtactgttcaagcaaggcatgttgttggtggttgtgctgtcggcaccgccattgatcgtggcggtagtcgtgggcgtgatgacgtccctggtgcaggcgctgatgcaggtgcaagaccagacgctgcctttcggcatcaagctggtggcggtaggtatcacgttgatcatgaccggccgctggattggcgtggagttgattcaactgatcaacctcacctttgacatgatcggccgatcggccctgaactgaggccctgcctgtgctggtttatctcgagtatctacccagcctggtgattggcatggcgcgtatctacccttgtggaatcctggtggcagccttctgttttcagcatattcggggcatgccacggcataccatcgtgatggtcctggccttgctgcctgcaccgggtattcatgcggcgttggtcggccaggactactcggcgatgctgcttggggtgttggtgctcaaggaggtgggcctggggattttactgggcgtgctgctttcgatgccgttctggatgttcgagtcggtgggggcgctgctggacaaccagcgcggcgccttggcgggtggccagctcaacccttcgttggggccggatgcgacaccgatcgggcatttgttcaagcagctggcaattttcctgctgatggtcagcctggggttggggacgttgacccaagtgatctgggacagttatttgatctggccgcccacagtgtggtttccggtgccggccattaacggcatgagcgtgtttatcgacctgttgggggagacgttcacgcacatgatgctctacgccgcgccgtttattgcagtgttgctgttgctggagttcggcatcgcactgctgggggtctacagccagcagttacaagtgagcacgctggcgccaccagtcaagagcctggcggggatcggcatcctcttgctctacttcacgttgctgcaggacctgattgtcgggcgtatggggctattgggtgaccttaaacaatcgctgaggttgttgatcaaggtcgctatcccatgagtgactccggcgaaaaaaagcacccggcgtcagccaagaagctgcgggatcaacgcaagaaaggccaagtcgcccaaagccaggatgtggcaaagctggtggcgcttacggccatcagcgaaattgccttgttcactgccgagagcagcctgcaacgcttccaacaattgatgctgctgccgatgtcgcgcctgacccagccctttgcgcgagcgttggaggaagtactgtttgaaggcatggtggtgtttttctcattcgccctgttgatggccggggtggcgattgccgccaagctgatcagcagttggatgcagttcgggttgctgtttgcaccggagaccctgaagctggatttcaatcgcctcaacccgatcagccaaatcaagcaaatgttctcggcccagcagttgatgaacttgttgatgagtgtcgcaaaagcctgcctgattgcgttgattctgtatgtggtgatctggccctcattgggtacgttagtcaatttggccaccagtgatctgcagagttatatcctggcgttgatcgctttgtttcgccacttgctgcatgtctgtctcggcatgctgctggtgctggcgctcatcgacctgatcatggcgaagcacttttttgccaaacgcatgcgcatgacccaggtggaggtcgttaaagagtacaaagacatggaaggcgacccccatgtaaagggccagcggcgcgcactggcgcaacaattggcccaggaggagccgaaggtcaagctgcccaagctggaagaggccgatatgctggtggtcaacccgacgcactttgctgtggccttgtactaccgccccggtaaaacgccgctgcccttgctggtcagcaaaggcatggatgccgaagcccgtaaactgatccatcgcgccaaggtcgccgacgtaccggtaatccagtgcgtgtggctggcccgtacgctctacacaaggcagctgggtaccagtatcccccgcgaaaccctgcaggcggttgcagtgatttaccgcaccttgcgcgagctcgatgatgaagccaagcgcgaaaccctggagttgccggaacttgagcaacgttgatcagcggtttctacctgcgtccaaggcttgcagattggccagcgacagcagacggctgaggaccctgtccacagcactgtgggctgcgggcagagcgtgccaaatcaccagagcatcctggtcgtcgacgtagataaaacaaccatcgaacgccagcgcctgctcaaatcgccgttctaacacccgctgcaattgcccggcctgcactgcttcgcgagcgatcttcagtgccagtccctggcggtttccagcccgcagtgcgcaagcgctgataccgggtgccagggacaggtgagcatcggtgccgctcaccaggctgctcagaaatacctggcgttgatcgtcgggcattggctggtgcttcatcgttcaagcgaaatcgtctggtagtccgcgcgctcgccggaggggccgggttcgactcgcattgatgagggccaccagatgaccatcttgtctttggtcgattgtgggcgtgagcacgaatcacctttgcaggtaggagtacatccgctgacgagcaaggctgcactgatcaggatgatacgtaacggtctgtatttcatggcgtggccttttgagcaggtgtgatcaaggagggacggggcacgctgaggtgtgcatccttcactactgggcgcatggcgataaacacctcggtttcctcacctggcttgagccaggcgcgcggccacacggtgactgccagggtctgcgagttactgcactccttttcgtcgatacgtacgttgcgtttgaactggttgcgtaacaccacgaccgctacgttgtattctgggcccgcgtaccactggctacgttcggtattcagcgccaggaggtcacgggtgttgcataaggtgttcagtcccagtggcatcggcgccgcgttgaacgccttgggcacttccccgctgaccagatgcgccagggtagaaatgatgtcactgcgcttgatgaccggctgatggggagccaggcgtttggccaacggagcgagggcggcctgcaattcggcttggtcggcttgtggcaagtagcgcgacgggtcgtcctggtccccgatgacgcgtggggtgaggatgaacaggcgttcacggcgattgctatggcgttctatcgatgaaaacagtgccttgcccaaaagcggaatatctccgagcaacggtatcttgctgtgcttgtcggtgttgtcggtgacatggaaaccgccgacgaccagcgaacgtttttcctccatgactgcctgggtactgaccttgccccggcgcacatcagggtggttgggcgttgggttggtctcgtcgaaactgccatcttcgatgtcgaccgccaaatggatccggtgagcgccccggccggtggtgacccgaggtatgacttgaaggctggtgcccacggtgaccggcaaagtggttgcgaaatctccactggtggtgatgtattgggtgcggttgaagtcgatcaccgccggttggttctccagggtgagcaccgaggggtttgagaccatggttgccagtcccttttcttccagcgcgcgtatgtcggcgtagaagcgatcgcgatgttcaatccacagctgcgacgaagtcccgggtgccatgttgacgccaccccggaagcggctgttctggaaaccccaattcacgccgaattcacgcagttgtgtacgctcgatgtcgagaatgatcgcatcgatttctatcagcttgcgtgcgacatcgagttgagtgatcaactcgcggtacatggcctgacgttcgggcaggtcatagatcagcacggcgttgttgcgcacatcggcttcgacacggattcgtccggcagataccggcgcgcgcggggtcaccgccggccctgcgtccacctgccctgtgttggcgtgtgcaccgagcatttggcccagcagcgggttgcccaaccgtggcacattgggtgtgaggggggccggttgggatgttgggcgttgagacagtcctgtaagcgtcgaggcggagcgcggttccagcaggccacgtaaaatgctggcgacgccgggcacgttgagcttctcgccgcgataatccacctggcggtctgccgcattggcaaacttcaacgggtaactgagcacgctctgtttttcatctgcagagcgacgctggctgctgaattgcttgatctgttctatgtagcgcttggggccggagacgagtaccacaccgtcttccggcaactcgccccagccaaagcggctatcgagcaggccgatatcggtcagggcctgcttgaggtccgctatcgtctctgaagagacctccaggcgcgcggactcctgttggtcaagcgtgctgacgaatagggtgttgttgtagagataccattgaaaacgatgctcgacgcccagtctgtccagcagagactggggggtattcgcgcggatcttaccgttgacgttgccttccagcaggccctcgatttgcagttgggtgccaaaggtctgagcgaagtcttcgagtacttcgcgcagcggtttgtgttcggcctcgtaggcgtacgcggtgtttttccattcgggggggatggcggccaaggtgtttcctgctggaatcagcaaccaggaaagcagcaccagatttcgccaatgaggtcttttgggcgagtcgtcaggcgaagcaaggcgcaaaaaagtgcgcttgtggttcttgttatgcattgtcggctctctggttagtacgacagtgaacgtagtgaggtgggtcttaggttccggggctggtgagcaaagcgtgcacacgcagcgcgccaggtatcgcgttggttgagcagggcttcgaggcaaacgagcacgcacgcctctctttgttcgccttgcaggctttgaatcagccaaagcgcaccgttgtcggcttttcgggcaagtgcgccttggaaatgattcaggctgacgaagcccaggcgcatccaccgctgcaaggctgtgttatctgagcaggtcgacgtcagttgagcggcgagtaataaagacccactctggcgttttaatacgattgggtcatcgccttcatagaaggttgtctgttcatcgcggctgtttaaccagtcactgactatcgcctgcatattattgaaaactctcaaaacaattcttgagcagcaggtgattaactcgattgtgttccagataggacatttgagttgtcattttctttacggccagttcaaagaacagatcggcgtcggcatcgtctgcctgggtggcgagagacgttgatttgaatgtgttgtgcgcgcgcttgctattgttcagaagttgacgtggtagatcgctgaaaaagtccatgggtatttcctttttgtttgccgggatagtgagtgaacactggattttttcccggtgcggagggcaaatggcaaagtcggtagcgttagatgtttatccggtactcgttgctgtgaataaaaaaggtatcgagcattgagcgccaactgatacgaaagtctccttcgtcggttttcaatacgagtgtctgagaaggagtggaaccgtcagcatgaagtttccagaacatcggcttgtgagtggccagacactgttttatttcctcaaaatcattggggtgacataacagggctgcttcgatctctgggacttgattggccatcaattgcttcagcatggctgcaagccttttgggagctaccgtctcgtcgagcacacagcgaattgcctgattggtgatggacgtcgcgtactgttccaggttgtcgagcattgcttggcggtcgcgctcccagcgcttgaattgcgtgtctgcgcgctgccagatctcaagtgatgaggtttccagaagcgcttcgcattttttttctgcctggcgtatcagttcagcggctttagtatgggcgcggttcaagagctcttctgcttgctcccagttcgcaagttcttcccggggtatcagattgcctcgcaacccgggtgtgtccttgaacaactcaagggtgtatcggcataacatcgctggtctcctcaccattggagtcaggaagcgtggggtcgtccgcccaggttgtaatgcgccagactatggcttgccataacgtgttcagccgactgtttacatgctcgaatgaggtgttattttcctctaccctctgcacgcgctcacgggaaaaacgcaatctaagacgctgccaggtagtgggttccacccagctatggagcagttgcagcgggtccaggctcggcaacaacaggtctggcgggagagccttggatagacgcatgcaccacaggtgatggctatcgctcaacggcattgccggctcagtgcagaaggttcgctgaaccagcgtgagtgccaggctcagttgttcctcggaggccagggccaggtgcaataccgtggaggggggcgtgggaggcaggcaggctgtcactcccatgaagtcgcgtggcgtccatcgcctgcttcgataaagcgcgtcaaccgccctgtactcatcacccttccagtcgtcgtgcgcgtgcctccaagggaatgcccaccatttagcccaagccaggtgttcagcgatggaggggtacggactaggcatcatgagccggaccgactgattcacctgctacgggcgagccttgtaggagctttttacgtcgattgtgcaggaccagtgcggcgactaccgctgccaccataccgagcagtgacgcgataacgctgcttcgccaaaaggcgagattctcgctgggcaccaggaacggaccgaagtacaccaggcgttgctgttcctgataggtagtggcaggtacgaagatcacggtaagtttttgcaggttgtccactgcagtggtcatgcctgggatgctgcttgccaccattctgcgaacgcgcgcgcggatgttatcggggtctaggcgcggatcgtgcttgatgaataccgaagcggatgccggttggacaggttctcctggagcgatgcgttcgggcaatactacgtgcacacgtgcaacgataaccccgtcaattttggataaggtcgcttcaagctcctgagataaggcatagatatagcgtgctcgctcttccagaggtgtggaaataaccccttccttgcgaaatgtatcgcctagcgaagttcgagccaccctgggtaaaccagcggcttccagcgtgcgtactgcacgtccgatgtcggttgcttctaccgctacgacgacaccatcttttgccgggattttttgggcgcgaatatgtttgtctgccaattcagcgaccacctcattggcttcttgctcagagagttggcgatgaagttctacgcggtcaccgcaaccgcttaacagaaagatagccgtgagaaatagagcggccggtagaatgttattcatgatgactattgcaagttacagattttgtcgatgcattgagttgccttgccaaggctttttaccatcagttgtgaggtgataacggcacctgataattcgcgtgggtattcgttgaatgcagtcatgtctgtgctgttacttgatgatttcagcgctcgcgccatgcgattttctttggctttaagcagttccgatagctctgccagtatggtaagtgtggtacctgaatctgtaggagcgcgcgccgacgttgaaggagcgagcatagcgctgaaaaaagtggcgtctgtgttgaaggccgaatgttctcgcgtgtcacgggagtcttcggagcggtggtgttgcgttaagagtgcatattcttctatctgcatgtgaggccttcaaggtgggagagctaaagcagatgctgaatgtttgtggatgccatgattgttgtaatttatatagcggcctccccggcagtcgagccggggaggttattgcgttatcgcacttctttacctgcggagtacgcgtttgtaatggtcttcgcttgcaggctctgctgaaaacctttctcggcgactgcggctgctcgcgcgatctggtcatcgctgcctggggatacttcattgcccgataacatatctttgagctgttgaaatattgcgttgttgttgctaccagatatactagaaatactcataataaactccaagttcatctatagggtttgatttactcgcctcggatcaagacacacagcgggtctgcaaggctgataaacttaatccaagctatgactgtgtggcgagcgtgtatgaaacgttccggatattttcgagagcatatgtttctatatgttttccaatgaataggtttttgccagtgatatgtccagttgtttcattcggtagtacagcgtgcgctttgcaaggcctagttctacggccgcggtgtctacacaatggcggtggcgatgcagcgactcctctatcaaagctttttcaatttgttgcaggcgaactttaaggcttacttgggtttctcgctggctgtctccggggggggagagcggtgacaagcccagcacaaagcgttttgctgtcgaccggagctcacgaatattcccgcgccacgagtgactgagcagttgttgcagtaacccgcctgaagggggcggggctgtgcatttgaagtggtcggcttcctgctggaccatttccaggaacaacggaatgatgtgctcacgtcgatcgcgtaatggcggcagctggatgttcacgacattcaggcggaaataaagatcacgtctaaaggtgccccgttcgaccatctggtggagagaagcttgggcagacgcgatgacacgcatgtccacagggatgaaacgggttgagcccaggcgctctactccacgcgactccagaacgcgcagcagtttggcttgcaggcccaatggcatgctatcgatctcatcaaggtagagcgtgcccaggtgggctgcctcaatgaagcctgccctggattgcatcgctccggtataggcaccactgttgacgccgaacaattggctttccgcaaggctttccgggatggccgcacagttcacggcaacaaagttgcctcggcgtcccgataagcgatgaattcgctctgccaaggtatccttgccggtaccggtttctcccagtaacagcaggtcaatattgagggtcgccgtgctgttaagtgtctgttcaatgtccgggccttcgatgagtgacgttgccgtttcattttctttgttgaaggcagccgacattgaatgatgctccgtgctcgctattaagccattgtcaaaaatacggtatgtagatgctgactagtaacgcctagggtatagaagttttcatcctttcttaaggtgggaagggggaaagtcttgtggggaagtgtctctttgttgtggcgataaagtaactattttgaacttgagctcgaggggggtaggagaagtctgaaattatttaatattttgatgtgagtagtcacttgttgagcattaaacagtcacgcataaaaaaagccgatgcagagcatcagcttttttatctgtagcttaaatggcgagtgatgattacacgttaaaccggaaatgcatcacatcgccatcttttacaatgtattccttaccttccaaacgccacttgcccgcttccttggcaccggcctcacccttgaactggatgaagtcgttgtaggcaatcacttcggcgcggataaaccctttttcgaagtccgtgtggatcaccccagcagcctgtggtgcggtagcaccgaccttgacggtccacgcacggacttcttcgacaccggcggtgaagtaggtctgcaggttgagcatttcataaccggcgcggatcacacggttcaggccaggttcttccaggcccagggcctcgaggaacatgtctttttcttcaccgtcatccagctcggcgatttccgcttcgatcttgttgcacaccggcaccacgatggcgccttcttcgtcggcgatggccttgaccacgtccagcagtgggttgttctcgaaaccgtcttcagcgacgttggcgatgtacatcaccggcttggtggtcagcaggtggaaacccttgatcacggccttctcatcggcgcccatgttcttcatcaggctgcgtgccggcttgccttcggtgaagtgagcaatcaactgctccagcaggcctttctggacgactgcgtccttgtcgccgcccttggcgttacgtgcgactttctgcagttgcttctcgcagctgtcgaggtcggcgaagatcagttccaggtcgatgatctcgatgtcgcgtttcgggtcgacgctgttggatacgtggattacgttctcgtcttcaaagcagcggaccacgtgagcgatggcatcggtctcacggatgttggccaggaacttgttgcccaggccttcacccttcgacgcaccggcgaccaggccggcgatgtcgacgaactccatggtggtcggcaggatgcgcttgggattgacgatggccgccagggcgtccaagcgtggatccggcatcggcacgataccgctgttgggctcgatggtgcagaaggggaagttctccgccgcaataccggatttggtcagggcgttgaacagggtggatttgccgacgttgggcaggccgacgatgccgcaattgaatcccatggtgtttcccctcggtaagagtcaggccttctggctgtgcaggtttttcatcgcgcggttccattcaccggcgaagatatccggcagcacgccgagggcaaagtcgatgctggcatcgagtttttcctgttcggcgcgtggcgcacgacccaggacgaaatttgaaaccatactggcaacgcctgggtggccaatgccgagccgcagacggtagaaattattctgattacccaactgcgcgatgatgtcgcgcaggccgttgtgcccgccatgcccgccgcccagcttgagcttggcaacaccgggtggcaggtccagttcgtcatgggccaccaggatttcctcgggtttgatccggaagaaacccgcaagcgccgcgacagcctggccgctgcggttcatgtaggtggtgggaatcagcagacgaacatcctgaccctggtgcgaaaagcgcccggtcaggccgaaatgtttgcgatcggccaccaggttcacaccttgggcgtgggcgatgcgctcaacaaaaagggcccccgcgttatgccgggtctgttcgtattcggcgcctggatttcccaggccaacgatcagtttaatggcagtcacgacaggggcccttcctttggagttgtggataacatcgccagacctgagtgcggcgaaagtggacgacactacatcatttactcaagagtaaacgccgcgttatcgcccgctttctcgctacgtttcggtccgcgatgtttcctcaagctccggcaatgcagagtgaattactctgcagcgccttcttcagcttctggagcaacgcgtggagcgtgaacgttggcaactgctttgtcatcaccgtgagccagtgcgacaaactcaacgcctttaggggccttgaggtcggacaggtgaacgatagcgccgatttccagagccgacaggtcgacttcgatgaactcaggcaggtctttcggcaggcaggtcacttcgatttcgttcagtacgtgcgagatctcgccgcctttcttgaccggagcgtcttcaccaacaaagtgcacaggcacgatagcggtcagtttctggccagctacaacgcgaacgaagtcggcgtgcatgatgaactgcttggacgggtgacgctgcatcgctttaacgatgacgttctgcttggcgccgtcgacgttcagctcgataacgtggctgtaggcagcttcgttttcgaacagcttggcgatttccttggccaggatggtcacggattcagcaggcttgttaccaccgtatacaacggctgggatgttggcggcgtgacgcaggcggcggctcgcacctttccccaggtcagtacgcgcttgggcgttcagagtaaagtcagtcattttgtatctccaaaatagccatcatcgagcggcgtttgcgaccagcgccggcctcgacatgggcaaaaaagccccgccccaacagaatgtcggggcggggcgcttttcgtcagtggaatgtaccgaaggtttgacccttagcggaacatcgcgctgatcgattcttcattgctgatacggcgaaccgcctcggcaactaccggtgcgatatccagttgacggatacgcgaacaggcttgagcagcagcggacaacgggatggtgttggtcaccaccagttcgtccagcatggaattctcgatgttctcgatcgctcggcccgacagcacagggtgtgtgcagtaggcgaagactttagcggcaccgtgctctttcaaggctttcgccgcgtggcacagggtgccggcggtgtcgaccatgtcatcaaccagaatacaggtacgcccttcgacatcaccgatgatatgcatcacttcagagtgattggctttctcgcggcgtttgtcgatgatcccgaggtccacgcccagggatttggcaacggctcgtgcacgcacgacgccaccaatgtccggggacacgatcatcaggttttcaaagcgctggtcttcgatgtcatccaccaatacgggggagccgtagatgttatctaccggaatatcgaagaacccctggatttggtcagcgtgcaggtcaaccgtgagaacacggtcgatacctaccacggtcagcatgtcagcaacgactttcgcgctgatggccacacgtgcggagcgcggacggcgatcctgacgggcataaccaaagtaagggattacagctgtgattcgagtcgctgaggagcggcggaaggcatcagccatcacgacgagttccatcaggttatcgttggtcggagcgcaggtcggctgaataatgaacacgtctttaccgcggacgttttcattgatctcggctgtaatttcgccgtcggagaatttaccgacagagatgtcaccgagagggatatgcagctgacgtacgacacgtcgagccagatcggggttggcgttccccgtaaagaccatcatcttggacacgcgcagtacctagaggctgagggtaacctggatgagtataggaaaatggcaggggcggctggattcgaaccaacgcatggcaggatcaaaacctgctgccttaccgcttggcgacgcccctgtatctgttgcaacgagtgcctaacactcggttcctttagagcagactttgcaacttgcgatgcaacatcgaaacgttgcttccctttgctacaaaccctgtaagggtctctgtaagaagggccgagactttatcagcttcagctttgcttgggaagcccccaaacacacaacttccagttccggttaattttgcttcggtaaatttacctaacaaattcaaagcgttacgtacctctggataacgccttgctacaaccggtaagcagtcatttcgactgtttcccttgggaacggggcgcactttaatgggagaagagttacgtgtcaacaacggatctgaaaaaatttctgctgtacttacagatacttgcggcacaagcacgacataccacggctcttcggggtattccggggtgagtttctcccccacgccctcggcgaaagccgcgtgcccacgcacgaaaaccgggacgtcggcgcccagtgtcaggcccagtgtggccagccgatcatggtcccaacccagttgccacaagtgattcaggcccagcagagttgtcgcggcattcgagctgccgccgccgatgccaccgcccatgggcaggattttatcgatccagatatcgatgccgagcgcgcaaccggattgctcctgaagtttttttgcggccttcacgatcaggttactgtcgtgaggcacgccttcgaattcggtatgcagcttgatcacgccatcgtcgcgtacagcgaaggtcagctcgtcgccgtagtcgaggaattgaaacagcgtctgcagttcgtgatagccgtcttcacggcgaccgagaatgtgcagcatcaggttgagcttggccggggagggcagggtcaatgtttgtacggacacgttattgccccagcttgcgtggttgccagtccttgatcaccagtgtgacgtcaaggtcgggaccatgcagcttgatgcgctctggcaaccaatagccgctttgctctacgtagctcaaatactcgacctgccaaccatcctgctccaggctggccaggcggctgtcgccgttgaggctcaggcgactcttgctgtcaggtgcgggcaaaccgcgtacccaccacaccaggtgagacaccggcagcttccagccgatctgttgttccagcaattcttccggagaagccgcttcgtagcggccctggttggccacttcaaggctgacttgccccggccggccggtcaggcgtgcggcgccacggcccagcgggccagacaggcgaatatcgtagtagtcctggcgttgcagccagaacaaggtgccgctgccggagtctttcggcgcgcgaacccccactttgccttcgatctgccagccatcgatgctgctgagctggtccttgtgctgcttccattgcgccgggttgccctggccttcaacggattcacggctgccgatgcccgcgcaaccggcgagcagggctatgaggctgaaaataacaacgtggcgcaagaacataagcttaaagagtctcggatccggtcaggcgcttgatggtgccgcgcaggatagggctttcgggttgttccttgaggaatttttcccagatctggcgtgcttcgcgctgtttgccattggcccacagcacttcgcccaagtgggcggcgacttcctggtcggggaagcgctccagcgcctggcgcagcaagcgttcggcctcatccaggttgcccaggcggtaattcacccagcccaggctgtcgagcacggccgggtcctccgggttgagcttgtgggcttgctcgatcagcaccttggcttcgtcgtagcgcgtggtgcggtcggacaaggtgtagcccagggcgtttagggccatggcgttgtccggatcgcgcttgatgatcaggcgcaggtctttttccatctgcgccaggtcattgcgtttttccgcctgcatggcgcgggtgtacagcaggttcaaatcatccgggaattgcagcaaggcttgttgcagcagcttccaggcgcgctcgccctggttgttggccgacagggtttcggcctggatcaggtagagctggatcgcgtaatccggttcggcatcccgcgcggcggccaggcgtttctccgcctcgtcggtgcggccgttgctcatcaggatgtcggcctggcgcaattgggcgggcaggtagtcgttgccggggccgacctgggcatattcgagcagggcggcttgcggatcgttgcgctcttcggcgatacggccgaggttcaggtgcgccgaatccacatggctttcacgttggatcagctcctccaggtaacccttggcctcgtcccaggccttggcttccaggcacaccagtgccagggaataacgcaattcgtcgtcgtccgggtattgctggaccaggttggcgaactgcactttggcgtcctccatgcggtcctgttccaccagcatgcgtgcgtaagtcaggcgcaggcgcttgtcgtccggatacttcttgaggcttttttccagcagcggaatcgcttccttgccgcgattgaggttctgcagcaggcgtgcgcgcagcaggatcggcgcgatttcgccttcttccggcggattctgctccagcagcttcagggccgcatcggcttcatcatcctgttgcagcagtaacgccttgccaaaaatcaactggctgttcttcgggtgcttttgcagcaggcggtcgaaactcttcatcaggccattgcgcgtgtcctggtcggtgtcggcagccgacagcgcgaggaagtcgaaatgggtgtcgcccttgccctgcaggactttctccatatagaccatggagtcgtcatagcgcccggcgcgtgccaactgaatggctgccgcccgctgtgcttccaggtcgtccggagcgtttttcgcccagatcagcgaggagtccagcgcagcctgatcggcccccaggtactcggcgatgcggaaggcccgctcggaaattcccggatcctgggtgttgatggcctgggtcacgtagttatccagcgcaatatcgaagcgattgcgctggccggccagttccgcggtcagcaggctgtacaccgtttcttcggtgaacgaggaataaaccttgggcttttcaggggcgggagtggtgtcttccaccggcggcgtaccgtccggcgacacgggggccatggcctggcagccgctgagaaagacaaaggcgaggagcaacgcggaagatctattcatataggaagaggacgactaacctgcggtcggatcatcatgacacaagccttcggccaaacataaccgagtctcagttgatgcctttatagacacaaggcattaggacaatagacgacggtggttgttctgaatctttcgaagtaggacaattgtcggcttcccgacatcatcagcgatattgaatggccttcctcgcactcggtattaaccacaagactgcctccgtagacgtgcgcgagcgcgtggcgtttacgcctgagcagttggttgaggccttgcagcagctctgccggctcaccgacagccgcgaagctgcgatcctttcgacctgcaatcgcagcgagctttatatagagcaggagcatctttcagcggatgtcgtactgcgctggctggccgattaccatcatttggacctcgatgaccttcgcgccagcgcttatgtgcacgaagaggatgcggcagttcgtcacatgatgcgtgtggcggccggcctcgattcgctggtgttgggcgagccgcagattctgggccagatgaagtccgcctacgccgtggcgcgtgaagccggcaccgtcggcccgctgctggggcgcctgttccaggccaccttcaattccgccaagcaggtgcgcaccgacaccgccatcggtgaaaacccggtgtccgtggcgtttgccgccgtaagcctggccaaacagattttcagtgacttgcaacgcagccaggcgctgctgatcggcgctggcgagaccatcaccctggttgcccgccatctgcatgacctgggcgtgaagcgtatcgtggtcgccaaccgcacattggagcgcgccagcatcctcgccgagcagttcggcgcccatgcggtgttgctggcggacattccggccgaactggtgcgcagcgatatcgtcatcagctccaccgccagccaactgccgatcctgggcaagggcgcggtcgagagcgcgctgaagctgcgcaagcacaagccgatcttcatggtggatattgccgttccccgggatatcgaacccgaagtcggcgagttggacgacgtttacctctacagcgtcgacgatctgcacgaagtggtcgccgaaaacctcaagagccgccagggcgccgcccaggctgccgaggaaatggtcagcaccggcgccgaagacttcatggtgcgcctgcgtgaactggcggcggtggacgtgctcaaggcgtatcgtcagcaaggcgaacgcatgcgcgacgaggaattgatcaaggcccagcgcttgctggccaacggcagcagcgccgaggaggtgctgatgcaactggcccgtggcctcaccaacaaattgctgcatgcacccagtgtgcaactgaaaaagcttaccgccgaaggccgcctcgatgcgctggccatggcccaggaactctttgccctcggtgagggcgcgtcagatagctcttcggataaaaaaccgcaatgaaagcgtcactgctcaataaactggacgtgctccaggaccgtttcgaagaactgaccgccttgctcggcgatggcgaggtcatctccgatcagaccaaattccgtgcctattccaaggaatacgccgaagttgagcccgttgtggccacttacaagaatctgctgaaggtgcaggccgaccttgaaggtgcccaggcactgctcaaggacagcgacccggacatgcgcgaaatggccgtggaagaagtccgcgaagccaaggaaaaactcgccgagctggaaggcgacctgcaacgcatgctgctgcccaaggacccgaatgacgggcgcaacgtgttcctcgaaatccgtgccggcaccggcggtgacgaggcggcgatcttctccggcgacctgttccgtatgtactcgcggtatgccgaacgtcgcggctggcgcgtagagatcctgtccgagaacgaaggcgaacacggcggatataaagaagttatcgcacgggtcgagggcgacaacgtctacggcaagctcaaattcgagtccggcgcgcaccgcgtgcagcgtgtccccgcgaccgagtcccagggccgtatccacacttcggcgtgcaccgttgccgtgttgccagaaccggacgagcaggaagccatcgagatcaacccggccgacctgcgcatcgacacctaccgctcctcgggcgccggtggtcagcacgtcaacaagaccgactcggcgatccgcatcacgcacttgccgtcgggcatcgtggtggagtgccaggaagagcgctcccagcacaagaaccgggcgcgggctatgtcctggctgtcggccaaactcaatgaccagcagaccagcgccgccgccaacgcgattgccagcgagcgcaagttgctggtgggctcgggcgaccgctccgagcgcatccgtacatacaactttgcccaaggccgggtcaccgaccaccgggtcaacctcaccctttactccctggacgagatccttgccggtggagtggatgcggtgatcgagccgttgctcgccgaataccaggccgatcaactggccgcgataggtgattaaatgaccattatcgccagcctgctgcgcgccgccgacctgcccgactcgcccacggcgcgcctggatgccgaattgttgctggcggctgccctgggtaagtcgcgcagttacctgcatacctggcccgagaaaatcgtcagcagcgagcacgcgctgacctttgccggctacctgcaacgccgtcgcggcggtgagccggtggcctatatcctcggccagcaaggcttctggaagctggacctggaggtcgcgccccacacgctgatcccgcgtccggataccgaattgctggtggaaaccgccctggaattgttgcccgccacgccggccaaggtcctcgacctgggcactggcagcggcgccatcgccctggccctggccagcgaacgcccggcctggcaggtcaccgccgtcgaccgtgtgctggaagccgtggccctggccgagcgcaaccgccagcggttgcacctcaataacgccacggtgctgaacagccattggttcagcgcgctgcacggccatacctatgacctgatcatcagcaacccgccgtacattgccgccaacgatccgcacctggtggcgggcgacgtgcgtttcgagccggccagcgcattggtggccggccatgatggcttggacgacctgcgcctgatcatcaaagaagccccggcccacctgaatgccggtggccggctgttgctggagcacggttacgaccaggccccggccgtgcgcgacctgctgttgagtgaagggtttgaagaggtgcacagccgcatcgacctcggcggccatgagcgcatcaccctggggcgccggccgtgctgaccgatcaggagctgttgcgctatagccggcagattctgttgcagcatgtcgacatcgacggccagttgcgcctgaaaaacggccgtgccttgatcgtcggcctcggtggcctgggcgcgcccgtcgcgttgtacctcgcagctgccggcgtcggcgagttgcatctggcggacttcgacaccgtcgacctgaccaacctgcaacgccagatcatccatgacactgacagcgtcgggcagaccaaggtcgactcggccctgcgtcgcctggcggcgatcaatcccgagattcaactggtcgcccatcgcaccgcgctggatgccgactccctggctgcggcggttgaagcggtcgatgtggtgctcgattgcagcgacaacttctccacccgcgaagccgtcaacgcggcctgcgtcgccgccggcaagcccttggtcagcggcgcggcgatccgtcttgaagggcagctgtcggtgttcgacccgcgtcgcgccgagagcccgtgctaccactgcttgtacgggcacggcagcgataccgaactcacctgcagcgaggctggtgtggtcggcccactggtcggtgtggtcggcagcctgcaagccctggaagccttgaaactgctggccggtttcggtgaaccgttggtaggccgcttgttgctgatagacgccctggccacgcgctttcgcgagttgcgcgtcaagcgtgaccccggttgcagcgtgtgcgggacgccacatggttaagggcgcgccgatcggtgtgttcgattccggtatcggtggcttgaccgtgctggacgaaatccaccagctattgccccaggaatcactgctgtacgtggccgattgcgggcatatcccctacggcgagaaaagcccggcgtttatccttgaacgctcgcggcaggtggcggcatttttccaggcgcagggcgccaaagcctttgtgattgcttgtaataccgccactgttgccgccgtcgctgatctgcgtctggattttcccgattggccgctggtggggatggagcctgctgtcaaaccggcggcggcagccacccgcagtggcgtggtcggggtgcttgccaccaccggcacgctgcaaagcgccaagttcgccgcgctgctcgaccgcttcgctaccgatgtgaaggtcatcacccaaccgtgcccgggcctggtggagctgatcgaaagcggtgacctgaccagcccggccttgcgccagttattgcagggctatatcgacccgctgctcagcgccggttgcgacactgtcatcctcggctgcacccactatcccttcctcaagccgctcctggcgcacatgctgccccccagcatcatcctcatcgacaccggcgctgccgtggcccgccagctcaaacgtttgctgggtgagcgcgacctattggccgtcggcaatccagcaccggcacagttctggaccagcggcgatgtgtgtcacctaagaaatatcctaccgacactatggaaatatccgggcgttgtgagaagcttcggctcgtgaaaatttcgtgaaatacccgcgttattagctggaacttctggctacacgccagcttcctatagcgagatagcctgtagaaaatcatataacttcgttcggaaaggatgtttcttatgaagcgcttgttctgtttggctgcgattgcggccgctgtagtggggcactctgtttcggcgcaggccgctggcctggaactgggggtggggagcaccagcgattcgaccatgacctaccgtttggggctgacatcggactgggacaaaagctggtggcagagcgataccggccggttgaccggctactggagcggcgcctacacctattgggatggggacaagcgggccagcgccagcagtctctcgttctcgccggtgtttgtgtatgaatttgccggggagtcggtgaagccttacatcgaggccgggatcggggtcgcagtgttttcccgcaccaagctggaggacaacaacatcggccaggcctttcagttcgaagaccgcctgggtttcggcctgcgcttcgcgggtgggcatgaggtgggtattcgtgccacgcattattccaatgcgggtatcagcagcaataacgatggggtagagagctactcgttgcattacaccttgccgttgtaactcttcaggacactgaaaaaaatatgtgggaggggcaagccccctcccacagttgattgccacaatcttcagcatcagcggtaggcggtagcgataccctgtcgctcttccaggcactccggcgcgcccatctcgaactcccgacaaatcagtggccgccgctcgtagatcgtgcacatcatcgtgtcccggtccagcgccgcgcaccagccgtcgtccaggcgcagcatcacttcaccgccccactcatcggtatcgatatagcgctccggcacgccggtgtcggtgatcaacatgacttccagctggcagcagcaggccgcacacgtcgagcaggtgacggcgggttcggcgatttgggtgtgggggatgttggtcataggcgtgcagtgtaaggcaagcgggtgacgcacgtgtgaaacggctgacggacgtcagcgcgccagccgatgcaaacccacaaacaccatcgcccacagcagcgccagcgcaaccatcgtgggcgcgaagccgaaaccaaactgcacccctgccagttggctaccggcgtaataagacagcgggccgcccagcgcacccagcacggcggcacgccaccagggacgggcactccaggccaggcaatgacgcaacgtcgtcgccagcaatgcccatagcaggatcaaccagaagggaatcaacgtgcccggttccgtgaactcaaacacccccagcatgcgcaacgcggtgtccaatagggtgcccagaaccatcacgctcaggatcaacctgccgtcttcagcccacgaacttatccacagcaggtgaactgccagcacggcaagccccaccattaaccacgggctgtccccacccagcacacaggcaaaccaaccgcactgaaacagcacggcattggccagcgtcttaagcattgaagcgcccgagcagcggcgggttgatcgccgatggcttggccagcagcaattgcgcggtgccaatggtgcgctccatgaagccgccttcgcagtagcacaggtaaaactcccacaggcgcaggaagtattcgtcgtagcccagctcggcgaggcgaccgtgggcgcgacgaaaattctcatgccacaggcgtagggttcgtgcgtagtgcaggccgaaatcttccatgtgcagcaggttcatgtcggtgttgcggctgacgatgtgcagcatgttctgcacacagggcagggcgccgccggggaagatatagcgctggataaaatccacgctgcgcttggcctgttcaaagcgttgctcacgaatggtgatggcttgcagcaacatcagcccatcgttcttgagcaggtgcgcgcactgtttgaagtaggtcggcaggaagcgatggcccaccgcctcgatcatctcgatggacaccagcttgtcgtattggccggtgaggtcgcggtagtcctgcagcagcagcgtgacctggccttgcaaccccagggcttcgatgcgctgttgggtgtaggcgaactgttccttggagagtgtcgtggtggtgacctggcagccgtaatgctgcgccgcgtacagcgccatgctgccccagccggtgccgatttccagcaggtggtcggtgggcttgagggcaagcttctggcagatgcgctccagcttgttcaactgcgcctgttcgagggtgtcgtcgggcgtcagaaactgcgccgctgagtacatcatggttgggtcgaggaattcttcgaacaggtcgttgcccaggtcgtagtgggcggcgatgttcttctgcgaacccttgcgcgtgttgcggttgagccagtgcaggccctgggtgaacggccgcgccaggcgtgccaggccgccttccattgcatcgagcacgtccaggttgctgaccatcacgcgcaccacggcggtcaggtccgggctggtccagtaaccgtggataaacgcttcgccggcgccgatggacccgctggccgccacgaggccccacacggcagagtccaggatctggatttcccccagcaagtgcgcttcccgtgcgccgaacacttgccgctcgccgtcctcgatcaccaccaactggccatggcgcagttggctgagttggcgcaataccgccttgcgcagcagcgcggcggtcatgccgttgacgttcaggcggtgagtcttgaccgataagctaggggatttcatggcggcgatccttggtgtacccgactgcggtgcgagaggcgccatcggcggcccggtgggaaaaaatcggcgtgcgtttgagcaacaggcgcaaggcctgccagtaaatggcgaggcaggtcttggcggtcatccaggggaaacgccacaggtagcgatgcaggctggcgcgatccagcgtttctttctccaggctcaacgtggcgtcgaagattttctgcgtgccctgccaatcggccatgtgcacgccgagcctggcggcgggagggctgaagctcatgcggtattccaggtcgcggggtagaaacggcgacacatggaaggccttggccacggcgaaatgctggtgctcatcggcgtccagggcctgggccggcagcacgtagtgatagcgttcgcgccatggggtgttggtcacttcacacaggatcgcggccagacgtccgtcggcctcgaagcagtagaagaaactcacggggttaaaagccaggccccaactacgggcctgggtcagtaggcagataacgccctggggtgtatgccccagtgccttgccgacttcctgacgcacggcatcgctcaagctcatgccggtgcgcgtccattcacgcaggtaatcctgctggcgaaaaccgaagggggccaggcgactgcgcccggccaggggcgagagcccaagcacttggtgttcttcgctcaaatccaggtacagcaggccgatgcggtagcgaaacgcatgggctttgggcgcaaaccgccgatgggcgatccagccgctgtacagggcgctgttcacagggtttccccaaaggcttcggccacgcgcaatgcgctgaccacgccgtcttcgtgaaagccgttggcccagtacgcgccgcagtaaaacgtctggcgcacaccggatatttcctcgcgacgcgcttgtgccgccaccgccgccaggctgtattgcgggtgggcgtaggtgtagcgggccagcaccttcagtgggttgatcattggcgtctggttgaggctgacgcaaaacgtggtggcgctgtcgatgccttgcaggatgttcatgtcataggtcaccgccgcctgtgcctggcgatcgccggtcagccggtaattccagctggcccaggcgagtttgcggtcgggcaacaggcgcgtgtcggtgtgtagcaccacgtcattgtcggcgtagggcatggcgccgaggatctcctgttcggcctggctcgggtcggccagcaacgccagggcctggtcgctgtggcaggcgaacaccacgcgatcaaacccttcactgccggccgggctgtggataaccacaccgttgtcggtgcgtgccactttatgcacagggcaattgaggcggatctgttcgcgaaaactgcgggtcaagggttcgatatagttgcttgaaccaccttcgatcacacaccactgcggacggttgttcaccgagagcaacccgtggttcttgaaaaagcgcacaaagaactgcaacgggaaccccagcatatcggccagggacatcgaccagatcgccgcgcccatcggcacgatgtagtgccgcacaaaccgctcgccgtaaccaccggcgctgagatagtcgcccagggtcatctcggcgctgatgcgctgctcctgcaggtccagcggcgcctggcgattgaaccgcaggatatcgcgcaacatgccccagaaccccggcgacaggatgttgcgacgctgggcaaacaggctgttgaggttgttgccgttgtactcgaaccgggtgtgctcgtcgcacaccgaaaagctcatctcggtcggtttgaacgccaccccgatctgccccagcaggcggatgaagttggggtaggtccagtcgttgaacacgatgaaaccggtgtcgaccgcgtagcgtttaccctcgacggtgacgttgaccgtgtgggtatgcccgccgacgcggtcgcccgcttcgaacagggtgatgtcgtgacggcggctgagcagataggcgctggtcagcccggcgatgccgctgccgataatggcgatcttcacaggtcgtcctttttcggcggcgggctgcgcaacatgcgcttgccgatgatcagttgcgcacggttcggcagtttcgacagcggccacaacgtggcgatgaacagtgcgggaaaggcgatttccaacgggcgcttttccagcttggcgaaaatatgccgtgcggctttatccgccgaccaactgaggggcatggggaagtcattgcgttcggtcagcggcgtgtcgacaaagcccgggctgatcacggtgacgtcgatattttccggcgacaggctgatgcgcaaggattcgaacagatagcgcaggccggccttggacgcgccataggcctcggcgcggggcatcggcaggtaggtcacggcgctggcgacacctaccaggtgcggcgtgtgcccggcgcgcagcagcggcagggcggcttcgatgcaataactgctggccagcaggttggtacgcaccacgtgctcaatgatcgatgagtcaaactgccgggcgtccacgtactcacaggtgccggcattgaggatgaccgtgtccagcgcgccccaggccacgccaatgcgctcaccgatctcgcgcacggtctggctgttggtcaggtcgccggccaccaccaacacctggccagggtagcgttgggcgagggcttccagcgggcctttcgaacgtgagctcaaggcgacgtgggcgccgctgttgagcaactccacggccagcgcggcaccgatgccactgctggcgccggtcagccaataacggcgaggcaatgtacggctcatcccattctccttttcagccagcccacgacgttgcccagcacgggcaagtgttcgtagagcatggcgccggcatcgaaataatcgcggtggcggtacaccttgtcgcgccacatcacgtgcgaacaaccttccacccggatcaccttgccgttggccaggcgtgggtggcagaaactcattttccagcgcaggtaaccctcaccttcggccacctgatcgaaaccgtggaagtcgaagcgtagctggctgacgttgctgtacagctcggcgaaatagcggtgcatggcgggcaggccctgcacctcgtgcagcgggtcggtaaagcggatgtcctggctgtacaggctgtcgagcaagtgcaggttgtgcttgtccagcgtggaaaaggcctgggcgaagcggcgcaggaagtcactcatactcgccccctgcagcttgtcgcgagggcaggctgcggaaggcggccagggcgcgttcacgggactttttcaggtcgacaatcgaacgcgggtaatccgccacgccgaacaagccaccggcggcttcggggttgtgtacttcttttttattcagcgcggccagttccggcagccagtgcttgatgaacacgccttcgctgtcgaatttttccgactggctcaaggggctgaaaatccggaagtatggcgccgagtcggtgccggtggacgaactccactgccagccgccgttattggccgccaggtcgccgtcgatcaggtggcgcatgaagaaacgctcgccctcgcgccagtcgatcagcaggttcttggtcaggaacatcgccacgaccatgcgcagacggttgtgcatccagccggtttcgagcagttggcgcatggccgcgtcgatgatcggcaggccggtgcgcgcttgctgccaggcggccaggtccttgggcgcgttgcgccaggcgacggcttcggtctcggggcggaacgcccggtggcgcgacacccgtgggtaacccaccaggatgtgcttgtagaactcgcgccaaagcagttcgttgatccaggtgatggcgcccatgtcgccgctttcaaactcgccgccgttggtttgcaacgcggcgtgcaggcactggcgcggcgataccacgccggcggcgaggtacgccgacagctggctggtgccgggcttggcggggaagtcgcggtcgtccttgtagtagctgatctgttggtcggcgaaggcgtcgaggcggcgccgggcttcggcttcaccagcaggccagagcgcgcgcagagtctcgctgggcggctcgaaaccgtcgactgtcttagggactgggtcgcttttgagcgtgagcgcagcctgggccttgggggccgcgactatccgcggcagtgcgctgtgcaggcggctgtagcagaccttgcggaattggctgaatacctggaagtaggtgccggtcttggtcagcacgctgccgggttggaaaaacagttggtccaggtagctgtggaagctgatgcccgccgactccaatgccttggacacggccgcatcgcgacggctttcatgaatcccgtattcctcgttgacgtgcaccgactccaccgccagttcacggcatagcgtgcccagcacgtcgggcgcctggtcccaggtggcggcggtacggatcagcaggggaatgttcagttcgccgagggttttgcccaggtcgtccaggttgcgcagccagaaatccaccttgcacggtgcatcgtcatgggccagccattgttcgggcgtgatcaggtacacggcggcgatcgggccccgctggctcgcggcggtcagggcggtgttgtcgtgtaggcgcaggtcggtgcgcagccagatcaaatgcatttaaacgagtccacgctggatcagtagctggtgggccgacaacaactcttcggcgacgaacaattcagggatgtcatgggttaatacggccaactcggcctggtggatgcataccgttggtccgacgatcaactttgggcaacggacgccgcccaaaagttttgccagccccgacacatgcagcgctttgctcgaatacaacagcacggcccgcggttgcaggtgctccaccgccagggccagttcgccagcgggcaaaggccagtcgaacacttccaccgggcaatcggcactgctggcgagccaggcgctgagccacaggtgtggctccaggggcaggtcggactgattgaccagcaacaacggcgcgccgtgcaactggcgattgttgtggtaaatgcgtgcgccgaatttgctgcgcagccatgagaggaaaaacacccgctccatctgcgcgccgaactggccttgccaacgctgttccaactctcgcagcagcggcagcatcaattgctcgcacaacgtgcgtggcgggtacagcgccatggcctggttgaaggcgtcatcgacccggcgttcgctcaattcgctgatggcttgcaccaggttctggcgcaggctgtgccactcgttttccaccgcctcaggaagggactgggccgagtcgatcaggcctttgacctggctcaccggcacgccgcgattgagccaggtgaggatggtgtggatgcgctgcacatgctcggcactgaacagccgatggcccttgggcgtgcgctggggcacgatcaggccgtaacggcgttcccaggcgcgcagggtcacggcgttgacgccggtctggcgcgccacttcgcggatcggcagccagccatcttccagtgcttgggcgatgtcgtcgccgggttcgtctagcagggcagctttcatggtctagatcgcatttcgcaggctgaggttttccgggtgcggttgcaggtaggcctgctgcgcgatgtagcggtccgggtgttggcgaaagtggtgtttgagcagggtcagcggcaccaccagcggcacgatgccgtggcggtactggccgatgacggtctgcatttcctgcttgtcatcggcgctgatgacctgcttgaggtaaccgctgatgtgttgcagcacgttggtgtgggtgccacgtgtggcgcattgggtgaggccggtcatcaagtcgctgaaataacgggtcgccaattcatcgagctgggtgcccttgttcatgctgcccagcaggtggccaaggcttttgtagtgtgccgggctgtgggccatcaacaagtatttgtagcgcgaatgaaaggccagcaggcggtggcgtgtcaggccttcggccaacagtttctgccagctggcgtagacgaatacgcgggtcaggaagttttcccgcagcaccgggtcgttcagccgaccgtcttcttccaccggcaggttgggatggcgcgcacagaaggcctgggcgtaaatgccgcgcccgccgccgtccaccggcgtgccattgtcacgatagaccttgacccgctccaggccgcacgacggcgatttctgcatgaagatgtagccgcacaggtcggtatgttccgcagccatctgctggccgtaatcgtccagcggctgggtgacattcaactcgcggttcacggtgccgacggcttgcgggtgggaggggtctcccaccagacggatcggttcgcgtggaatgcccaggccgatggcgacttcggggcacagcggcacgaagtcgaaatagtcggcgagggtctggctgcacagcagggattgtttatggccgccgttgaagcgcacgttctcgcccaacaggcaggcgctgatggcgatcttcggtttggtggtgctggacatacacgaaccctcagcgagattcctgtacaagatttaaatcctgtacaactaaatctcatcataggttcgatgctgtacaagtcaaattatttgtacaagttttgcgagtgcgctatttccagccgattttccaggcgtcgatatcctgcagggtttgccagggcaggcgctcgctgcggtgtgtcatcacggcctgcagttcaatgtcgagcaccgtgccttcttcatcacgaaacagctcggtgaccagaaagtgtttttctttgttgcgagggtggactgctgtccacttcgacagcagcaatttggcgggattgatgcggttcattgcaggtgctcgatcaagcgtcgtgcggcttcctggccgctgagccaggcaccttccacacggcccgacaggcaccagtcgccacacacgtacaggcccaggtcggcatcggccagcacaccgaattcgtggctgctggatggtcgagcatagagccagcggtgcgccaggctgaatgacggcgcgggcatggcgctgtgcagcagttcggcgaaggcgccgtgcaggtgctcgatcaccgcctctttgggcaggtccaggtgtgccttgctccaagcgctggtggcgtgcagcacccaggtgtcgagggtggtatcgcgcccaggtttgctgcggttgcgcgctagccagtcgagggggctgtcttgcacgaagcagccctccatcggggtatccaggggtttatcgaaggccagggcgatggcccaggtcgggtccattttcaccccggcggcggcactcgccagcttgggcgctgcggccagcaaggcggtggcctggggcgcaggcgtggcgatgatcacgtggctgaaggggccatggttttcgccgtccgcgtccagcaggttccagtggtgtttgccctggaacacctcggtgatgcggcaaccgaactccaccggcaggtcgtcgagcagggcgcgggtgattgcgctcatgcgcggcgtgccgacccagcggatctgttcatcgggggagggagtgagctggccggacttgaagttgtacagctggggcttccattgctcggcccagccgtggctttgccagcgttgcacttcgttgacgaagcgccggtcgcgggcggtgaagtattgcgcgcccatgtccagggagccggcatcgctgcgcttgctggacatgcgcccgccactgccgcggcttttatcgaagagttgtacaacgtgccccgcgtctcgtaacgctcgggcggcggagagaccggcgatgccggtgccgatgatcgcgatgggaacagtcatgggaggcctcgttttaccgttgtgcacagactacgcggacaccaatagctgtacaatattgttttttggtataagttttggcgtacctgttctaacggcgtaacctatggttaaagctgaggcttaagccagcgttacgcctgctaacaaatgatccctgtttataaaatagaccagtgatcggcggcgaacgttacatgaggagcgtcccatgcatattttgctgaccggcggtactggtttgattggccgccaactctgccaacactggctcacccagggccatcgcctgaccgtgtggagtcgccacgtggatcaggtcgccaaggtgtgcggcgctcaggtgtcgggagtcagccgcctgcaagaggttatcggcccggtcgacgcggtcattaacctggcgggcgcgcccattgccgaccgcccctggacccacaagcgcaaggcgctgttgtggagcagccgaatcagtcttaccgagaccttgctgacgtggcttgagggcctggaacaaaaaccggcggtgttgatttccggttcggcagtgggctggtatggcgatggcggcgagcgcgaactgaccgaagccaacggcccggtgcaggacgatttccccagccagctgtgcatcgcctgggaagaaaccgcccagcgcgccgaagctctggggatgcgtgtggtgctggtacgtaccggcctggtgctggcggcgcagggcggctttttgtcgaggctgttgctgccgttcaaactggcgctgggcgggcctatcggcagtggtcggcagtggatgccgtgggtgcatatcgaggatcaaatcgccctgattgattttcttctgcaccagcctgacgccagcggtccttataatgcctgcgcgccacacccggtgcgcaatcgcgagtttgcgaaaaccctgggccaggtgctgcaccgcccggcgttcatgccgatgccggcctttgcattgagggtgggcctgggcgagttgtccggcctgttgctgggcgggcagaaggcgctgcccgagcgcttgctggctgccggtttcactttccagttcactgagttgcgtgcggctttggatgacttgtccagccgcctctaaagataggatgttgcatgacggatcacgcgttgttactggtcaacctgggctcgccggcgtccacttcggtggcggatgtgcgcagctacctcaatcagttcctgatggacccttatgtgatcgacctgccgtggccggtgcggcgcttgctggtgtcgctgatcctgatcaagcgccccgagcagtcggcgcatgcctacgcgtccatctggtgggacgagggttcgccgctggtggtgctcagtcgccgcctgcaacagcagatgacttcgcagtggacccagggcccggtggagttggcgatgcgttatggtgagccgtcgattgaaagcgtgctgacccgtctcgccgcccaaggcattcgcaaggtcaccctggcgccgctgtatccgcagtttgccgacagcaccgtgaccacggtgatcgaggaagccaagcgcgtggtgcgcgacaaaaagctcgacgtgcaattctcgatcctgcaaccgttctacgatcagcccgaatatctcgacgccctggctgccagcgtaaggccgtacgtggaacagcattacgaccacctgctgctgagtttccacggtttgcccgagcgccatctgaccaagctcgaccctaccggccagcactgcttcaaggatgcagactgctgcaagaatgcgtccgccgaggtgctcaagacctgctatcgcgcgcagtgcttcagcgtcgcccgcgactttgccgcacgcctgggcttgcccgaagacaagtggtcggtggccttccaatcgcgcctgggccgcgccaagtggatcgaaccctacaccgaggctcgccttgaagcattggcccagcagggcgtgaaaaagctgctggtgatgtgcccggcgttcgtcgccgattgcatcgagacgctggaagaaatcggcgatcgcgggctggagcagttccgcgaggccgggggcgaggagttggtgttggtgccgtgcctgaatgatgatccgcagtgggcgaaggcgcttaataccctttgcgagcgcgcacccacggcgctgtaaccaaaccaagtgaagatcaaaatgtgggaggggacttgcccctcccacattttggttgtgttacaggttgagggtcaggctgaccgtgaggttgcgcggttcgcctgggctgatccagtagttgctgtaggaccgctcgtagtacttctcatcaaacaggttgttgaggttcaagcccacggtgacgttgtcggtggccttgtaatgggccagcagatcaaccgtgtggtaggccggcaattcgaaactcgtgccggcttcaccagagcggtcccccacataggtgaacgccgcccccaggtctgaaccgcgcaacgcaccatcctggaactcatacacccccaacaggctgccgctgcgcttggccacgccgagtatccggctgccggcaggaatgactttgtcgcccttggtcacttcagcatcaatgtaggcaaacgcgccaatcacccgtacggcgtcggtcacttgcccggacagttgcaggtcgaggccctggctgcgcgccttgcctacggcgcggttgaggttggtggccgggtccaggctcagcacgttttccttttctatatggaaggctgcgatcttagcgctgaggcgctcgtcgaacagctcgctcttgatccccacttcatagcccacgccttcctcaggcttgaaggacttgttgtcggcgcccaacccgctattgggcttgaacgaagtagaggcgttggcgaatacgccgacttgcggcgtgagctgatagagcaggccggcgcgctgggtaaaggcgttgtgggtttgctcggctttggcgtggttgcgggtgaagtcgtcgatacgctgctcgaaatgctcgaagcgcgctccgaccatgccgcgcaggcggtcggtgaagacgatctggtcttgcaggttcagcgcgtggctcttggtctgttcgaagaagtcggtgccggagcgcaggccgttgggtttggcctggccgtagaccgggttgtagatgtcgatgctgtagcggctaccgccaatcgccgtgacgcgctctttcttgcgatagtcctcgtattcggtgccgatcagcagttcgtgctgccaactgccgatgtcgaacaggccgcgcagctcgagctgggtaatgctgtcgtgccagcccatggagcgttcacggtagcggcggtcgatggtgtgaccgtcggcattcagtgcacggttttccgaggcgtcgccccacaggctgccttgtttgtagtggctggccagacgcagtttccaggcatcgttgaggtgatgctcaagggtggcctggagacgattgttgtggttgtcgatatcgccgtcgttgggttcgccgaggaaggtggaacgagatacgccgggggcgtcgacgatgccacggtcgaaggtagagctgtggcggacgaattcactctcgacgagcagactggtgtccgggtccagttgccaactgaacgaaggcgcgacgaatacccgcttgctctgcacgtgatcgcggaagctgtggttgtcttccaccgccaggttgacccgcgacagcaggttgccttcgccgtccagcggagtgttcacgtccacggcggtgcgatagcggtcccaactgccggcgctggtctgcacggtggtgaaggcttctggctggggcttcttggtgacaatgttcacggtgccgccgggatcgccgcgtccatacaggctggcagcggggcccttgagtacttcgatgcgctcgatattggccgcgtccggtgtactcgggtagccacggttggcgctgaaaccgtcctggtagaactcggacgtggtgaagccgcgcacgctgtattcgtacagagtcaggccgccgaagttgttttgcttggacacgccgccggcaaattccagggcgcgttccacgtgggtactgcccaggtccttgagcactgtggcgggaattacgctgatggattgcgggatgtcgcgaatggcggtgtcggtttttgtcgcgctggcggagcgggtggcgcggtagcctttgaccgggccggtggcggactcataggcgtcggtggtgacgctgatggtgtcgagttccagggtgttttcttcggcgaaggcggggtcgagcagcaaacccaaggccaggccagccatgggggcgattcttcgagacggcatgatagagcgttccaatagcgatattgaaacaatataacatgcctaatgagaatgacttgctttgaaatatcagtttacaggtgcccgggaaggggcacctgcaagcggcgacctattcctcttctttgaccggcgcgggcggcggacgcagcccgatttccgccagcaacttgatctctttgccgttgcgcatcacctggatcgccaccttctcggtcggcttgatccgcgccacctggttcatcgacttgcggccatcaccggccggttcgccgttgatgctgaggatgacatcccccagttgcaggccggctttctgcgccgggccatcgcggaagatcccggcgaccacgatgccagggcgtccggtcaagccaaatgactcggccagctccttggtcagcggctgtacctcgatccccagccagccgcgaatcacctggccgtgctcgatgatcgacttcatcacctccatcgccagcttcaccgggatcgcaaacccgatgccctgggagccgccggacttggagaagatcgccgtgttgatgcccgtcaggttgccattggcgtccaccaatgcaccgccggagttacccgggttgatcgccgcgtcggtctggatgaagtcttcgtagctgttaaggcccagttggttgcgcccggtggcactgataatgcccatggtcacggtctggcccacgccgaacgggttgccgatggccagcgccacgtcacccacacgcaaaccgtcggaacggccgagggtgatggagggcaggctcttcaaatcgatcttcaataccgcaaggtcggtttccgggtcgctgcccaccactcgggccagggtttcgcgaccgtcacgcagggccaccacaatctggtcggcgccggtggtcacgtggttgttggtaaggatgtaaccttcggggctcatgatcaccccggagcccaggctggactccatgcgacgctgcttgggtccgttgtcaccgaagtaacggcggaactgcgggtcttcaaacagtggatgggccggtttgttgatcaccttggtggtgtacaggttgaccacggcaggggcggcgatcaccacggcatcggcgtaggtcaccgggccttgcaccaccgaattgctttgcggcgcctgttgcaggttcacatccaggctgggcagccccaccagctcggggtaacgctgaataatcagcatcgcgatcagcacgccagccagcaatggccatccaaaaaaacgcagcgccttgagcatcaagtaagtcctgacaggttgcagggggcgggagagcgcccataatgtcgcgcattatacgaggctgtgacgcctgcgaaccggatatttaggagtcttttatggccgtcccccttaccaccctcgtcgaggaagcggaccgctacctcggcagcgcaaaaattgccgattactgccccaatggcctgcaggtcgagggccggccacaggtgatgcgcatcgtcagcggcgtgaccgccagccaggccctgttggacgcggccgtcgaagcccaggcggatctggtcctggtgcaccacggttacttctggaaaggcgaaaacccgtgcatcaccggcatgaagcagcgccgcctgaagacgctgctcaagcacgacatcagcctgctggcctaccacctgccgctggacctgcatcccgaggtcggcaacaacgtgcagttggcccgtcaactcgacatcaccgtcgaaggcccgctggacccgggcaatcccaaaatcgtcgggctggtcggctcgctcgccgaaccgctgtcacctcgcgactttgcccgccgcgtgcaggaagtcatgggccgtgagccgttgctgatcgaaggcagcgagatgatccgccgcgtcggctggtgcaccggcggtggtcagggctacatcgacgacgcgattgcggccggtgtcgacctgttcctcagcggcgaagcctccgagcagaccttccacagcgcccgcgaaaacgacatcagcttcatcgccgccggtcaccatgccactgagcgctacggcgtgcaggcgctgggcgattacctggcgcggcgcttcgcgttggagcatttgttcatcgattgtcccaacccaatctaacaaacaccaccgaacaaatgtgggagggggcttgcccccgatggcggtggatcagctactcatgcagtgactgacacatcgctatcgggggcaagccccctcccacacttgaccgcgattaaccccaaactccgtggtatatccatataccgtttcggtctagtaggccgcctgaatagaagcaggtgctgtgctagcatgccccgctcgaacacggcccgctggccgtccataagatcgtttttccgtgagtaaccatggtcgacaaactgacgcatctgaaacagctggaggcggaaagcatccacatcatccgcgaggtcgccgccgagttcgacaacccggtgatgctctactcgatcggtaaagattccgccgtgatgctgcacctggcacgcaaggccttcttcccgggcaagctgccgttcccggtgatgcacgtcgacacccgctggaaattccaggagatgtacaagttccgcgacaagatggtcgaagaactgggcctggacctgatcacccacgtcaacccggacggcgtggcgcagaacatcaacccgttcacccacggcagtgccaagcacaccgacatcatgaagaccgaaggcctcaagcaggccctggacaagcatggtttcgacgcagcctttggcggcgcccgtcgcgatgaagagaaatcccgtgccaaagagcgcgtgtactcgttccgcgacagcaagcaccgctgggacccgaaaaaccagcgccccgagctgtggaatgtctacaacggcaacgtcaacaagggcgagtcgatccgcgtgttcccgctgtccaactggaccgaactggacatctggcagtacatctacctggaaggcatcccgatcgtaccgctgtacttcgccgccgagcgtgaagtgatcgagaagaacggtacgttgatcatgatcgacgacgaccgcatcctcgagcacctgtccgacgaagacaaagcccgaatcgtcaaaaagaaagtacgtttccgtacccttggctgctacccgttgacgggcgcggtggagtccgaagccgagacgctgacggacatcattcaggaaatgctcctgacgcgaacttccgagcgccagggccgtgtcatcgaccacgatggcgcaggctcgatggaagataaaaaacgtcaaggttatttctaaggggctgtcatgtcgcatcaatctgatttgatcagcgaggacatcctcgcctacctgggccagcacgagcgcaaggaaatgttgcgcttcctgacctgtggcaacgtcgacgacggcaagagcaccctgatcgggcgcctgctgcacgactccaagatgatctacgaagatcacctggaagccatcacccgcgattcgaagaagtccggcaccaccggtgacgacatcgacctggccttgctggtcgacggcctgcaggccgagcgggagcaaggcatcaccatcgatgtcgcctatcgctacttctccaccgccaagcgcaagttcattatcgccgacacccccggccatgagcagtacacccgcaacatggccaccggtgcgtccacctgtgacctggcgatcatcctgatcgacgcgcgctacggcgtgcagacccagacccgtcgccacagcttcatcgcctcgttgctgggcatcaagcacatcgtggtggccgtcaacaagatggacatcaatggctttgaccaaagcgtattcgagcagatcaaggccgattacctgaagttcgccgacggtatcgccttcaagccgagcaccctggccttcgtgccgatgtcggcgctcaagggcgacaacgtggtgaacaagagcgagcgttcgccctggtacaccggccagtcgctgatggagatcctcgaaaccgtcgagatcgccaacgaccgcaattacaccgacctgcgcttcccagtgcagtacgtcaatcgtccgaacctgaatttccgtgggttcgccggcaccctggccagcggcatcgtgcacaagggcgacgaagttgtggtgctgccgtcgggcaagagcagccgcgtcaaatccattgtcaccttcgaaggtgagctggagcacgccggccctggtcaagcggtgacgctgaccatggaagacgagatcgatatctcccgtggcgacctgctggtgcatgccgacaacgtgccgcaagtgactgacgccttcgacgccatgctggtgtggatggccgaagagccgatgctgccgggcaagaaatacgacatcaagcgcgccaccagctacgtgccgggttccatcaccagcatcgtgcaccgtgtggacgtgaacaccctggccgaaggcccggcgagcgcgctgcaactgaacgagatcggtcgggtcaaggtcagcctcgacgccgccatcgcgctggacggttacgacagcaaccgcaccaccggtgcgtttatcgtcatcgaccgtttgaccaatggcacagtagccgcaggcatgatcatcgccccgccggtcggtcacggcagtgcggcgcagcacggcaagttggcccatgtggccaccgaagagcgtgcactgcgcttcggccagcaaccggccaccgtgttgttcagcggcctgtccggcgctggcaagagcaccctggcctatgcggtcgagcgcaagctgttcgacatgggccgtgcggtatttgtgctggatggccagaacctgcgccatgacctgaacaagggcttgccgcaggaccgtgccggtcgcaccgagaactggcgtcgtgccgcgcatgtggcgcgtcagttcaacgaagccggcctgctgaccctggccgcgttcgttgcgccggatgccgaaggccgtgaacaggccaaggcgttgattggcggcgaccgtctgctgaccgtctacgtgcaggcgtcgccgttggtgtgcgccgagcgcgatccgcaaggcctgtacgcggccggtggggataacatcccgggcgaatccttcccgtacgacgtgccgttgaatgccgatctggtgatcgacacccaggccctgtcactggaagaaagcgtcaagcaagtgctggagttgttgcgtcagcgcggcgcgatctaaagcctgtcgcaatcaaatgtgggagggggcttgcccccgatagcggagtgtcagtcagtacatctgttactgacccaacgccatcgggggcaagccccctcccacattcttgatcattgtttacctgggaattctctatgcagctgctccagtagctgatccttctgttcccagagctggttgatccagccctggaacgccaaccgatattccccatcctgctcataattcttgccaatgaattcggtcgggatctgcacctcttcaaactgcaccaccacgtcccgcacattcccgcacagcaaatcccaataacctgggcgcccagccgggtagtgaatggtcacgttcaccagtgacttcaactgctcccccatggcatccagcacaaacgcaatcccgccagccttgggcttgagcaggtaacggaagggggacttttgctgcgcatgcttgcctggggtaaaccgcgtgccctcggcaaagttgaaaatacccaccgggttgtcgcgaaacttcgcgcaggtcttgcgagtggtttccaggtccttgcctttcttttccgggtgtttctccaggtaggccttggtgtagcgtttcatgaacggaaagcccagcgcccaccacgccaggccaatcaccggcacccagatcagctcctgcttgagaaagaacttcagtgggcgaatccggcggttcagcacgtattgcagcaccatgatgtcgacccagctctggtggttgctggtgaccagatacgagtgctggtagtccagcccttccagcccggtgaggtgccagcgggtgcgtcgcaccaggttcatccagcccttgttgttggtcacccatgcctcatgggtgtggttcatcagccattcgctgaaacgcttggcaaacggcagggccttgaacagcgccacgataaacaggaacgaacacaacaggatcgtgttcagcgccaacaacagcgatgcaatcaccccgcgcatggcggcaggtagaaaatccagcatttagatatccataggtcggttggcggcttggatcgcagtgagcgcgatggtgtacacgatgtcgtccacctgggcgccgcgcggcaggtcgttgaccggtttgcgcaggccctggagcatcggccccaggctcacgcaatcggcactgcgctgcacggccttgtgcgtggtgttgccggtgttcaggtcggggaacacaaacactgtggccttgccggcgacctggctgttgggggccaattgccgggccacgttttcgttggcggcggcgtcgtattgcagtgggccgtcgatcagcagcgagctttgctgttcgtgggcgagcagggtggcttcgcggactttctccacttcttcgccgctggccgaatcgccgctggaatagctgatcatcgccacgcgcggggtgatgccgaacgcggctgccgagtcggcgctttgcagggcaatctctgccagttcggcggcgctcgggtgcgggttcatcacgcagtcgccgtacaccagcacctgctcggggaacagcatgaagaacaccgacgacaccagggtgcagcccggcgccgttttaatcagctgcagggcagggcggatggtgttggcggtggagtgaatgacgccggacaccaggccgtccacctcatcgagggcgagcatcatggtggcgatcaccacggtgtcttccagttgctgctcagccatcggcgcgttgaggcttttgctcttgcgcagcgccaccatcggctcgacgtagcgctggcggatcaggtccgggtcgagaatctccaggccttcaggcagttcgataccctgggcgcgggcgactgcttccacatccgccggcttggccagcagcacgcagcgcgcaatgccccgcgcctggcagatcgcggcggcttgcacggtcagcggctcgctgccttcgggcaacacgatgcgcttgttggcggcctgggcgcgctggatcagttggtagcggaacaccgccggcgacagacgcatttcccgtggtgtgccgcaacgttggtgcagccagcgcgcatcgaggtggctggcgacgaaatcggtgatgatttccgcacgctcgcggtcatcaatcgggatttccttgttgaggctgttgagctggttggcggtgtcgtaggaaccggtgctcaccgacagcaccggcagcccggcctggaacgcgccacggcacaactccatgatgcgcgggtcgggcagggtgtcgctggtcagcagcaggccggccagcggcacgccgttgatcgcggccaggctgacggcgaggatgatgtcgtcgcggtcgccgggcgtcaccaccagcacgccgggcttgagcagctccacggtgttacgcatggtgcgcgcgcagatgatgatcttggtcatgcgccgggtttcgtagtcgccggcgttgaggatctgcgcgcccatcaggtcggccacgtcgcgggtacgcggtgcgttgagttccggttgatagggaatgcagccgagcaagcggaaatcaccgctgcgcaacagcggcgaatgttccttgaggcgtgccgagaaggcttccatgctttcgtcggtgcgcaccttgttgaggatcacgccgagcactttggggtctttcgggccgccgaacagttgggcctgcagctcaacacgcccggagagttcggtgagcacttcgttttctggtgcggacaccaggatcacttccgcatccaggctcttggccaggtgcaggttgacccgcgccgcatagctggcgctgcgggtgggcaccatgccttcgacgatcaatacgtccttgcccaccgcggcttgctggtacagcgtgatgatttcttcgagcaactcgtcgagttggccgtcgccgagcatgcgctctacgtgggccaggcccagaggctgtggcggcttgaggccgtgggtgcgcgccaccagctcggtggagcgctcggggccggtgtcgccggggtgcggctgggcaatcggcttgaaaaagccgactttcagcccggctcgctcaagggtacgcaccagcccaaggctgatggaggtcagacccacaccaaaatcggtgggcgcgataaaaaaagtctgcatgcggattctctggaggtgcatggcttgggtgacgctctatggctgagcgtctaccgcgaatcaggcgccaaggttatcgttaatcgcgctcctgcgcacaccagccgcaggcaaagggctggcctaatttttcaatacgttgcgcggggtccagcacccaggcgcgtgactgccagggtggctggtggcgcaggtgctgggtgtggccgcaggacagctcggcgacccagtgctggtcgtcgtcctggtggaacccgatgatgaaggatgccgttgatcggtcccgtctgtccgggttctgttcgctttcgggcaaatccttgtttagacttgtccgttcttcattcttatgcaaaaggtctcgccccatgacgatcgccgctaacaaggctgtctccatcgactataccctgaccaacgacgctggtgaggtcatcgacagctcagccggcggcgcgccgctggtctacctgcaaggcgcaggtaacatcatcccaggcttggaaaaagccctggaaggcaagaatgtcggtgatgagctgaccgttgccgtagaacctgaagatgcctacggcgagtactcggccgaactggtcagcaccctgagccgcagcatgttcgaaggcgttgacgagctggaagtcggcatgcagttccacgcctccgcaccggacggccaaatgcagatcgtcaccatccgtgacctggacggcgacgacgtcaccgtcgacggcaaccacccgctggctggccagcgcctgaacttccaagtgaagatcgttgccattcgcgacgcttcccaggaagaagtggcccacggccacgttcacggtgaaggcggtcaccaccattgattgtggtttgatcaatcggtagcaaaaacgccccgactggttcggggcgtttttttgtgcctgaaaaaatgtgagagggggcttgcccccgattgcagtatgtcagtcagtacattctttactgacccaccgtcatcgggggcaagccccctcccacaacaaaaatgccccggacctttcggtacggggcatttcttaactgtttcgcaacctgggctgcgtagcagttgttaccacttaggctgcagcagcaacgctcagagccttgatgtggccattcaggcggctcttatggcgagcggccttgttcttgtggatgatgcctttatcggccatacggtcgataactggcacagccagaacgtaagcagcttgggctttttcagcgtctttggtgtcgatggctttaactacattcttgatgtaggtacgaaccatggaacgcaggctggcgttgtggctgcgacgcttctcagcctgttttgcacgttttttggcggaaggtgtgttggccaccgtcgagctcctcgaaagactttttaggaaatagcaaacaaaataggccgcgaatcatgccgatgacttgatgggttgtcaagggcggctgatgcgaactgctgagtggtcgatctgaagaggcgggtgatttatttccggcgcttgacctgtaaactcgcgagctttggctctgtgctgttgcaggcgcgcagtatcgcataagtgggcgctttgtacgcctgctctttatctaaaggcgcaaactctttcaatgaatctgctcaaatcgttggccgccgtcagctctatcacgatgatctcccgggttctggggtttgtgcgtgacaccctgctggcgcgcatttttggcgccagcatggccacggatgccttctttattgcgtttaaattgcccaacctgctgcggcggatcttcgccgaaggtgcgttttcccaggcattcgtgccgatcctggccgagtacaagacccagcagggcgaggaagctacccgtacctttattgcctatgtgtccggcctgctgaccctggtgctgatgctggtgacgattctgggcatgctcgccgccccctgggtgatctgggccacggcccccggttttgccaataccccggaaaaattcgcgctgaccaccgatctgctgcgagtgacctttccttatatattgctgatctccctgtcgtccctggccggggcgatcctcaatacctggaaccgcttctcggtgccagccttcgtgccgaccctgctgaacgtcagcatgatcatcttcgcgctgtttctcacgccgtacttcgaccctccagtgatggcgctcggctgggccgtgctggccggtggcctggcgcaactgctctaccaactgccgcacctgaaaaagatcggtatgctcgtattgccacgcctgaatctcaaggacaccggcgtatggcgcgtgatgcgcaatatgctgccggcgatccttggcgtgtcggtcagccagatttcgctgatcatcaacaccgcattcgcctcgctgctggtatcgggctcggtgtcgtggatgtactacgccgaccgcctgatggagctgccctccggggtgctcggcgtggccctgggcacgattctgctgccgaccctgtcgcgcacctacgccagcaaggaccgccaggaatactcgcgcatcctcgattggggcctacgcctgtgcttcgtgctggtgttgccgtgcgcactggccctggggatcctggctgagccgctgactgtgtcactgtttcaatacggccaattcgatgcccacgacgcactgatgacgcagcatgccttggtcgcctattccgttggcttgctcggcatcatcgtgatcaaggtgcttgcgccaggcttctatgctcagcaaaacatccgtacaccggtaaaaatcgcaattttcacgctgatcgtcacacaactgctcaacctggtgtttatcggcccgctggcccatgccggcctggccttggccatcagtgcgggcgcgtgcatcaacgcagggcttttgttttaccagttgcgtaagcagcagatgttccagccgcaggccggctggggtctgttcaccctcaagctgctggtggcggtcggggcgatgtcggccgtgttgctggggttgatgcacttcatgccggcgtgggatgaaggccatatgctggagcgcttcatgcgtcttggcgtgttggtcgtcgcgggtgtggtggtgtacttcgggatgttgctgctgcagggcttccgcctgcgggatttcaatcgcaagtccctgggttagagagtttgccgcgataaaacggttgttttatcgattcgacccatttggcccgttcagttgcctgtcgtccggggccgggtgtggttataatcgaccactttatgagcaagaagcgcgttatgcagctggttcgaggtctccacaacctgcgccccgagcatcggggctgcgtcgccactattggcaactttgacggtgttcaccgtggccaccaggctatcctggccaggctgcgcgaacgtgcggtcgagttgggcgtgcccagctgcgtggtgattttcgagccgcagccacgggaatactttacgcccgagactgcgccggcacgcctggcccgtctgcgtgacaagttgcaactgctggcggaagaaggcgttgaccgcgtcctctgcctggctttcaaccagcgtttgcaaagcctgagcgctgccgagttcgtcgaccgcatcctggttgatggcctgggcgtacagcacctggaggtcggtgacgacttccgcttcggttgcgaccgggtcggggatttcgatttcctgcaacaggccggcgtcagccagggttttaccgtcgaagccgcgcaaaccgtcgagctggacggcctgcgcgtgagcagtacccaggtgcgtaatgccctggcggctgccgacttcgccttggccgagcgtttgctcggtcgcccgttccgcattgccgggcgggtcctgcacggccagaagctggcgcgccaattgggcacgccaaccgccaacgtgcaactcaagcgccgtcgtgtgccgctgaccggggtttacctggtgagcgtcgacatcgacggccaatcgtggccgggagtcgccaacataggcgtcaggcccacggttgcaggtgatggcaaggcccacctggaagtacatctgctggattttgccggtgatctgtatgaccggcgtttgacggtggttttccaccagaagctgcgtgaagagcagcgtttcgcctcccttgaggcgttgaaaacggcgatcaatgcggatgtcgccgccgcccgtgcactagccgcacctagcgcccatcgctaaccgaagagccttaaatgaccgactataaagccacgttaaaccttccggacaccgccttcccaatgaaggccggcctgccacagcgcgaaccgcagatcctgcagcgctgggacagtattggcctgtacggaaagttgcgcgagattggcaaggatcgtccgaaattcgtcctgcacgacggccctccttatgccaacggcacgattcacatcggtcatgcgctgaacaagattctcaaggacatgatcctgcgctcgaaaaccctgtcgggcttcgacgcgccttatgtcccgggttgggactgccacggcctgccgatcgaacacaaagtcgaagtgacctacggcaagaacctgggcgcggataaaacccgcgaactgtgccgtgcctacgccaccgagcagatcgaagggcagaagtccgagttcatccgcctgggcgtgctgggcgagtgggacaacccgtacaagaccatgaacttcaagaacgaggccggtgaaatccgcgccttggccgaaatcgtcaagggcggtttcgtgttcaagggcctcaagcccgtgaactggtgcttcgactgcggttcggccctggccgaagcggaagtcgagtacgaagacaagaagtcctcgaccatcgacgtggccttcccggtcgccgacgacgccaagctggccgaggccttcggcctggcaagcctgggcaagccggctgccatcgtgatctggaccaccacgccgtggaccatcccggccaaccaggcgctgaacgtgcacccggaattcacctacgccctggtggacatcggtgaccgcctgctggtgctggccgaagaaatggtcgaagcctgcctggcccgctacgagctgcaaggttcggtgatcgccaccaccaccggctccgcgctggaactgatcaatttccgccacccgttctatgaccgcctgtcgccggtatacttggctgactacgtcgaactgggttcgggtaccggcatcgtgcactgctcgccggcctacggcgtggacgacttcgtcatctgcaagaagtacggcctggtcaacgacgacatcatcaacccggtgcaaagcaacggcgtctacgtgccttcgctggagttcttcggcggccagttcatcttcaaggccgaccagccgatcatcgacaagctgcgcgaagtcggtgcgctgatgcagaccgcgaccatccagcacagctacatgcactgctggcgccacaagaccccgctgatctatcgcgccactgcgcagtggttcatcggcatggacaaagaaccgaccagcggcgacaccctgcgtgtccgctcgctcaaagccatcgaagacaccaagttcgtcccggcctggggccaggcgcgcctgcactcgatgatcgccaaccgccctgactggtgcatctcgcgccagcgtaactggggcgtgccgatcccgttcttcctgaacaaggaaagcggcgagctgcacccacgtaccgtcgaactgatggaacaagtggcccagcgtgtcgaacaggaaggcatcgaagcctggttcaagctggacgctgccgagttgctgggcgatgaagcgccgcagtacgacaagatcagcgacaccctcgacgtgtggttcgactcgggcactacgcactggcacgtgctgcgcggctcgcacccgatgggtcacgaaaccggcccgcgtgccgacctgtacctggaaggctcggaccaacaccgtggctggttccactcgtcgttgctgaccggttgcgccatcgacaaccacgcgccgtaccgcgaactgctgacccacggcttcaccgtcgacgagacaggccgcaagatgtccaagtcgctgaagaacgtgatcgagccgaaaaagatcaacgacaccctgggcgccgacatcatgcgtctgtgggtcgcgtcgaccgactactcgggtgaaatcgccgtgtcggaccagatcctggctcgcagcgccgatgcctaccgtcgtatccgtaataccgcgcgcttcctgctgtcgaacctgaccggtttcaacccggtcaccgacctcctgccggccgaggacatgctcgcgctggaccgttgggccgtggaccgtaccctgttgctgcaacgcgagttgcaggaaaactacggcgaataccgtttctggaacgtctattcgaagatccacaacttctgcgtgcaggagttgggtggtttctacctcgacatcatcaaggaccgccagtacaccaccggcaccaacagcaaggcgcgccgttcggcgcagaccgcgctgtatcacatcagcgaagcgctggtgcgctggatcgcaccgatcctggcgttcaccgccgacgaactgtgggaatacctgccgggcgagcgcaacgaatctgtgatgctcaacacctggtacgacggcctgaccgaactgccggccggcttcgaactgggccgcgagtactgggaaggcgtgatggccgtgaaggttgcggtgaacaaggagctggaagtacagcgtgcggccaaggccgtcggtggcaacctgcaagccgaggtcaccctgtttgccgaagacggtctcaccgccgacctggccaagctgagcaacgaactgcgcttcgtgctgatcacttctaccgcgagcctggcgccattcgcccaggccccggcggacgcggttgccaccgaagtgccgggcctcaagctcaaagtggtcaagtcggccttccctaagtgcgcccgttgctggcactgtcgtgaagacgttggcgtgaaccccgagcatccggaaatctgcggtcgttgcgtcgacaatatctcgggcgctggcgaggttcgccactatgcctaacgccagtcgtttcggacgtctgggctggctcgtactgagtgtgctggtcctggtcatcgaccaggtcagcaaggctcatttcgaaggctccctgcagatgttccagcaaatcgtggtgatcccggattacttcagctggaccctggcctacaacaccggcgccgccttcagcttcctggctgacagcggtggctggcagcgctggctgtttgctctgatcgccgtggtggtcagtgcggtgctggtggtgtggctcaagcgcctgggtcgcgatgacacctggctggccatcgccctggccctggtgttgggcggcgcgctcggcaacctgtatgaccgcattgccctgggccatgtgatcgacttcatcctggtgcattggcagaaccgccattacttcccggcgttcaacttcgccgacagcgccatcaccgtcggtgcaatcatgctggcgctggatatgttcaaaagcaagaaaaccggagagaccgtcaatgactgatcaggtattggctgagcaacgcatcggccagaacacggaagtcactttgcatttcgcactgcgcctggagaatggcgacacggtcgacagcacgttcgacaaagccccggccaccttcaaggtcggcgacggcaacctgctgccgggtttcgaagcggccctgttcggcttcaaggccggcgacaagcgcaccctgcagatcctgccggaaaacgcctttggccagcccaacccgcaaaacgtacagatcatcccgcgttcgcagttccaggacatggacctgtcggaaggcctgctggtgatcttcaacgatgcggcgaataccgaactgccgggtgtggtgaaaaccttcgatgacgcgcaagtgaccatcgacttcaaccacccgttggccggtaaaaccttgacctttgacgttgaaatcatcgacgttaaagcgctctgatcaacaacacacaattaaatgtgtgaagtgggcttgtgtgggagggggcttgcccccgatagcggtggaacagtcaggggtttgtttactgacccaccgccatcgggggcaagtcgaatcgtcgcaccgcccctccctcctttgatcttcattttcggttgggttagcgtcacaccagacccaaatagctgcaagacacgaggcacagcatgcaaatcaaactcgccaacccccgtggcttctgcgccggtgtggaccgggcgatcgaaatcgtcaaccgcgccctggaagtcttcgggccgccgatttacgtgcgtcatgaagtcgtccacaacaaattcgttgtcgaagacctgcgtgcacgtggcgccatctttgtcgaagagctcgaccaggtgccagacgatgtgatcgtcatcttcagcgcccacggtgtatcccaggcggtgcgtaccgaagcggcaggccgcggcctgaaagtcttcgatgctacctgcccactggtcaccaaggtgcacatagaagtcgcgcgctatagccgtgacgggcgcgagtgcatcctgatcggccacgccggccacccggaagtcgaaggcaccatggggcagtacgatgccagcaatggcggctccatttatctggtggaagacgaaaaggatgtcgccaacctgcaggtacagaaccccgagcgcctggcattcgtgacccagaccaccctgtccatggacgacaccagtcgcgtgatcgacgcgctgcgcagtcgcttcccggccattggcggcccgcgcaaggacgacatctgctacgccacccagaaccgccaggacgcggtcaagcaactggcagacgaatgcgatgtggtcctggtagtcggcagccccaacagttccaactccaaccgcttgcgtgagttggctgagcgcatggcgacgccagcgtacctgatcgacggtgccgaagacatgcagcgtagctggttcgatggcgtcgagcgtattggtatcacggcgggtgcttcggccccggaagtgctggtgcgcggtgttatccagcagttgcacgcctggggcgccaccggtgccgatgaactggctggccgcgaagagaacatcacgttctccatgcccaaggaactgcgggttcgctcgctgctgtaaaaaaccggcgtgccggatcaactccggcacaatgcctgctcggcacgctcgctgcgcaggctgatgcgcccgctgggtgccagcactacctgatacaggctctgcgcctggtccgcggcacacacatgcacggtgccggcacggaagcctccccctgaaaagatgggctcacccagcccgctgaagcgcacctggttcttgagcggcccattgcccacgatcggcgcttgcctgctggcctggtgctccaacagcaccgggttgtcatcgtccagggggccgcgcccgctgatgtccacgatgacccgccaccccaggccccaatcatccctcagtgcgtgaatgaccaccgcccggttgcgtgcgatggcttcggtgcgtgcataacgcaggccttgcgtcaaggactgtgctgcgctctgtcgctgctgtgactccagcaggctcttgaaactcggcaccgccaggttggccagaatgccgctcacgatcagccccagcagcagttcgatcaaggtgaaccctcgttgttgcatgtgccatccctccgtggatttgggtgtagtcctagttatagcgtcccgtctgtggtgcggatgatggccttcatgtccaaagtatttccctttgttccggttgcagcgcaggtgaaaaaccggcgctagtcttgggccgcacagcagggtttacctgctctttttcggacctcgacacggatgacgacggtaatgcttgcctgcacgaacacctgtttgcccaacgccttatcccgctaccaagccggtacgacactgatcgaagtgctggtcgcggtgttgattctcaccattggcctgctgggtgcggcggtgatccaactcaatgcgctcaagtacaccgacagttccaggatgaccagccaggccagtttcattgcctacgacttgctcgaccggatccgtgccaattctgctgccgactacacgtggggccgggccgagcgtgccttggccggcaatgttgccgccagtgcgcgcgacctggacttgcatgatttcgaggccaacattctcggttttgccggggagagcgccaaaggctcggtgtcgatcagtggcggcgaggtgacggtcagaatcagttgggatgacagtcgaggtacaggcaggccgggtgcccgggaaaccttcaccctgaccagtcgcatccgcgatgaaccgggagtggcgcaatgaggtgtcttgttcgaggtttcagcctggtggaggtgctgctagcgttggcgatggggctggtactggtgctctgggccagccaggtggcaattcagtccagggctactcatgccagccagcaggccgcgctgttgatgcaggatgatgcgcggtttgtgctgggcaagctgctccaggatatccgtcaggcgggcatgttcggctgtctggcgacagcgtttatcgacaacgccccgcccgcttttgaccggcctgtcgcttggcgtgtcggaggcggatcaacctcgctgacgctggtgaccgcggaggtcgccgttggaagcggcacgcctgactggactgtattgtccgattgcacaggcagcgcccacgcctacgcgggaagcgccccggcatcggcacccgggcaaatccgttttgcgttacgccaagttacctacaccttcgaagcagggcagttgaaagtcagtacgcctgcatcacccgccaaggcggtattggtggataacgtgaaggcattcgatatcagtttcggcgtgtccgccaaacctgcgtcaacggaagtggtgcgctacgacgccggcccggccgacgaatccttgatacgcagtgtgcgcattgtgatgacgctgcaagaccctaccgcccgggtgaaagatcaaacctacagcgtcgtggcggcgctgcggaaccgactggggtagggctaccatgatgcatttagagcgttttcgtctgcgacaggcgggcatggtgctgctggtcagcctggtgttgctgctgctgttatcgctgatcggcttatcctcgatgcaggctgcgctcactcagcaaaagattgccggtagtttctggcaccgtaatcagtcgctgcaaagtgccgagagtggcttgagattgggagaactccttgtaaggcgggcgtccgcaggcttgacgttgtgtcagtcaattgccacctgcgtgccgcccgctgaagcgttttcggttgtgggctccggaacccaccctgtctcgggcatcaagtgggtcgctctcaaaggcggggtttacggcattcagttcctgggccctgcggttgggctgacacatttaccggcacaaaccacggctgcggtgtatcgagtgacggcagtcgggctgcacgggcaattgcgcacggtgctggagagtacctatgcgcgggtagaagaggagggtggctcgcggtttcggcgagtggcatggcgacaacttcaataaggagtagtggaatgggcatggacagccagggttttaccctgatcgagttactgatcgccgtggtgatcattgcggttctggccgggattgcttaccccagttacaccggccatctgaaaaaagtctatcgcgctgaaatcgttgcgctgttgaccgagcaagcacaggacctggagcgcttttatgcgagaaacggcagttttattgatgcagccggcctcagtgcaggcaatgatcgctatagaatcaccgctgcattgaaccctcaggacttccaactggtggccacaccggtcgccgactcggtgatggctggcgatccttgcggggatttcggcctgaccggcgcgggcacgcggaccaacccgggcgctgcgccgcagatgtcgcgcaagctgtgctgggggcaatgatgagggtgctggatgattgggcgccgggtgcgcttgttcctatttatcggctggatcaaatgatggcagagcaacagcaggtagtgattgtcggtggcggagtcatcggcttgttgacggcgttcaacctcgcgacccaagggcaggcggtggtgttgctggagcgtgctggattgggacaggaatcctcctgggccggcggcggcatcgtttcgcccctgtatccgtggcgctacagcccggcggtcacggccctggctcattggtcccaggatttttatccacagctggcgcagcgtctgttcgctgcgacgggcgttgatccggaggttcacaccacgggcttgtactggctcgatctggatgacgaagccgaagccctttcttgggccgcgcgtgaaggccgtcccttgagcaaagtggacgtgtcggccgcccatgacgccgttccggtgctgggcggcggttattcccaggcgatctacatggccaacgttgccaatgtgcgaaacccgcgcctggtcaaatcgctcaaggcggcgctgctggcgctgcccggcgtgaccattcatgaacagtgtgaagtgactggttttgttctggatgcgggtaatgtcgtgggcgtgaacacagctgatgggtcgatctacggcgatcaggtcgtactggccgccggcgcctggagcggtgagctgctcggcacgttgggcctgtcgctgccggtcgagccggtaaaaggccagatgattctgtacaaatgcgcttcggacttcctgtcgagcatggtattagccaaggggcgttacgcgatccctcggcgggacgggcacatcctgatcggcagtaccctggaacatgaaggtttcgacaagacccccaccgaaaccgcgctggaaagcctcaaggcatcagcggtggagttgattcccgccctggcggacgccgaggtggtcggacattgggccggtctgcgccctggttcgcccgaaggcattccctacatcggtcgtgtgccgggtttcaatggcctgtggctcaactgcgggcattaccgcaacggcctggtgcttgcgccggcgtcctgccaattgtttgctgacttgctactggcgcgcgcaccgatcatcgacccggcgccgtatgcgccggaaggtcggctcaacgctggatagattttggcccttgctccaggtgcgcctgggtgcaataccactcctggcgagagctcagggcgcgatcctgcggcagatgcacgccgcagtgggcgcagcgcaccatcagggccgcgtcaggctcgctggcacgatgctgcctggcggctgggcttttgaatttgcgccagaaccatactgcggcggcaatgacggcaatccagaacagtagacgaagcatgatgggcagtttctcgacaaggaatgcgccagtttagccaaggacgtgccaggcgcacagcgcaataataccgcccacaaaaaaggagcctcgcaaggctccttcttgatgacgccggtgcaatcagtcaaatacaccgaaggtcatgtagctgaaccacgagcggtcctggttgttgcctagggcctgcggtgcttcttcttcgatcacgtcgccgttttcatcatgcggcttgaggtccgaagggatggcgtccttggcgtcctggtactgcttgatgacgtcctggttggcgcgggtttcgcccggcggcagcggtggacgggactcgatcaggcccaaggtgtacttgctcagccacgaacggttgtccgcttcggccacctgaggcacgaactggccgtctttcaggcttgggtggtccgggtagttgagcttcagggtttccaggctggtgctggccagttcgtccaggtgcaggcgctggtaagcctcggtcatcacggccaggccatcacccacggaaggggtttcctggaagttttccacaacatagcggccacggttggctgcggccacgtatgcctgacgggtcaggtagtagtgggccacgtggatctcgtaggacgccagcaggttgcgcaggtagatcatgcgctgcttggcgtcaggcgcgtagcggctgttggggtagcggctggtcaactgggcgaactcgttataggagtcgcgggcagcgcccgggtcacgcttggtcatgtccagcggcaggaagcgcgccagcaggccgacgtcctggtcgaacgaggtcaggcccttcatgtagtaggcgtagtcgacgttcgggtgctgcgggtgcaggcggataaaacgctcggcggcggacttggcggcttccggctcggcgttcttgtagttggcgtagatcagctcgagctgggcctggtcggcataacgcccgaacggatagcgcgactccagggccttcagcttcgctgtggcgctggtgtagctattattgtccaagtctttctgagccagttggtacaactcgacttcgctcaggttttcgtcgacgacttcctttgttgacgagcaagcagcagtcatggcgaggatggcgatcagcagcaggtgtttcacttgcatggcggcttgcgtccctatgacggccgctgtcttgggcggggccgtcctgttatgatgagcgccccgttgaaagcctcggggcaaaagacgccgtatttaaccacaagcgcgcagccgaaaccaaaggctgtgccacgcctagtctgagcatgtccgataaaattgaacttcgcgcagaggtgccgtccgaattgggcggccaacgcctcgatcaagtcgccgcacaattattcgctgagcactcgcgctcgcgcctttccgcctggatcaaagacggccgcctgactgtggatggggcggttatccgcccgcgagacatagtccatggcggtgcgattcttgagctgactgccgagcaggaagcccagggagaatgggtcgcccaggacatcgagttggatatcgtctatgaagacgacgacatcctggtcatcaacaaacccgcaggcctggtggttcacccggccgccgggcacgctgatggcacgttgctcaatgccttgttgcaccatgtgccggacatcatcaatgtcccgcgttgtggcatcgtgcaccgcttggacaaggacaccaccggtctgatggtggtggccaagaccattcaggcgcagacgcagctggttacacagttgcagagccgcagcgtcagccggatctacgaatgcatcgtgattggtgtggtggtagccggcggcaagatcaacgccccgatcggtcgtcacggccagcaacgccagcgcatggcggtgatggaaggtggcaagcaggccgtcagccattaccgagtactcgaacgtttccgctcccacacccacgtgcgggtcaagctcgaaaccggccgtactcaccagattcgcgtgcacatggcacacatcaacttcccgttggtcggtgatccggcctacggcggtcgcttccgcattccaccggcggcgagccagaccatggttgaatcgctgaaaaacttcccgcgccaggcattgcatgcacgcttcctggaactggatcatccgacgagcggtaagcggatgagctgggaatcgcctctgccggacgatctggtctggttgttgacgctgctcaagcaggatcgcgaggcgtttgtcggatgagtgactggctgatacctgactggcccgcgccggctcaggtgaaagcctgcgtcaccactcgagcgggcggcgtcagtctggcgccgttcgacagcttcaacctgggcgatcatgttgaggataatcttgacgcggtcctcgaaaaccgccgccgtcttaccggcgcgttcaatattcagtctgcctggttgcgccaagtccacggggtaactgtggtcgaggctgacccgtcacgcattgccgaagctgatggcagctggaccagcacccctggcatcgcctgcacctcaatgaccgccgattgcctgcccgcgttgttctgcaaccgcgctggcacccgcgtggctgcagcccatgctggctggcgcggcctggcggcgggggtgctggaagcggctttcgaaagcctcggcgccgaacctgaagacgtgctggtctggctcggcccggcgattggcccacaagccttcgaagtcggcccggaagtacgcgaagccttcatgcagccgttgccgctcactgccgaagcgttcgtgccgagccacaacccaggcaagttcatggccgacatctataagctcgcgcgcctgcgcctcgctgcgcgcggcgttaatgctatctatggtggcgggtactgtacggtgaccgacccgcgcttcttttcctaccggcgcagcccccgcaccggacgttttgcctcccttgtgtggcttgaacgctagactcccttgatctgggtcaaacccggtccatatccgccatcgcgtgcttgaatcttccagaatccaccccatctataagggtatctggcaggtttcttcattcaggatgttttatagctccggcctgctcaaaaggaaggtgactaatgcgtattgatcgtttaaccagcaaattacagttggcattgtctgactctcaatccttggcggtgggcctcgaccacccggccatcgagcctgcgcacttgatgcaggcgctcctggaacagcaaggtggttctatcaagcccttgctgatgcaggtgggctttgacgtcaacagcctgcgcaaggaactgagcaaagagctcgaccagctgccgaaaatccaaaacccgaccggcgacgtgaatatgtcccaggacctggcgcgcctgctcaaccaggcggaccgtctggcccagcagaagggcgaccagttcatctccagtgagctggtgctgctcgccgccatggacgagaacagcaagctcggcaagttgttgctcggtcaaggcgtgagcaagaaagccctggaaaacgccatcaacaacctgcgtggcggcgacgcggtgaacgaccccaaccatgaggagtcgcgccaggccctggataaatacaccgtcgacctgaccaagcgcgccgaagagggcaagcttgatccggtgattggccgtgacgatgaaatccgtcgcaccatccaggtcctgcagcgtcgcaccaagaacaacccggtgctcatcggtgagcccggcgtgggtaaaaccgcgattgccgaaggtttggcccagcgcatcatcaatggtgaagtgccggatggccttaaaggcaagcgcctgctgtccctggacatggggtctttgatcgccggtgccaagttccgtggcgagttcgaggagcgcctgaaatccctgcttaatgagctgtcgaagcaggaagggcagatcattctgtttatcgacgaactgcacaccatggtcggcgccggtaaaggcgagggctccatggatgccggcaacatgctcaagccggccctggcgcggggtgagttgcactgcgtcggtgctaccacgctcaacgaatatcgccagtacatagaaaaggacgcggcccttgagcgtcgtttccagaaagtactggtggaagagccgagcgaagaagacaccatcgcaatcctgcgcggcctgaaagagcgttatgaggtccaccacaaggtggcgatcaccgacggtgcgatcattgcggcggccaagttgagccatcgctatatcaccgaccgtcagttgcccgacaaggccattgacctgatcgacgaagcggccagccgcatccgcatggagatcgactccaagccggaagtgctcgatcgcctggatcgacgcctgattcaactgaaagttgagtcccaggccctgaagaaagaagaagacgacgcggcgaagaaacgcctggaaaaactccaggaggaaatcgtccgcctggaacgcgagtattcggacctggaagaaatctggacctcggaaaaagccgaagtgcagggctctgcgcagatccagcaaaagatcgagcagtcgcgccaggaactggaagcggcacgtcgtaaaggcgacctgaaccgcatggccgagttgcagtacggggtgatcccggacctggaacgcagcctgcagatggtcgaccagcatggccacagcgagaaccagctgctgcgcagcaaagtgaccgaggaagaaattgccgaagtcgtctccaagtggaccggcatccccgtgtcgaaaatgctcgaaggcgagcgcgacaagctgctgaagatggaaagcctgttgcaccaacgcgtgatcggccaggaagaggccgtggtggcggtgtccaacgcggtacggcgttcgcgggctgggttgtccgacccgaaccgtccgagtggctcgttcatgttcctcggcccgaccggcgtgggtaagaccgagctgtgcaaggccctggccgagttcctcttcgataccgaagaggccatggtgcggatcgatatgtccgaattcatggagaaacactcggtggctcgcttgatcggtgctccaccaggctacgtgggctacgaggagggcggttacctgaccgaagccgtgcgccgtaagccctactcggtgatcctgctggatgaggtcgagaaggcgcatccggatgtgttcaacatcctgttgcaggtgctggaagacggccgactgacggacagtcacgggcgtaccgtggatttccgtaatacggtgatcgtgatgacctccaacctgggctcggcgcagatccaggagctggtgggtgatcgtgaagcgcaacgtgcggctgtcatggatgcactgacttcgcacttccgcccggaattcatcaaccgggtcgacgaagtggtgatcttcgagccgttggcgcgggatcagatcgcaggcattaccgagatccagctgggtcgcctgcgtggccgtctggcggagcgcgagttgtccctggacctgagccaggaggcgttggacaagctgatcgcggtgggttacgacccggtgtatggcgcacggcctttgaagcgtgcgatccagcgctggatcgagaacccgctggcccagctcatcctgtcgggcagcttcatgccgggcaccagcgtcgaggcgaccgtggaaaacgacgagatcgtcttccactaagcccaaagggcaaagcaaaaatgaaaggccccgcattgcggggccttttttttcgatagggcgttgaactgtaaggcaaaggcttgtaaagtgcgccccgcagcaacgtcagcccacgggtttcttctccccaagaagaaatcagaaacaagcgcaaatcattgtcttaaaagcaatttaaagggttgacaggggtttttaagattgtagaatagcgcgcctcagagacatgaacgtagcgatacgaacaagtcgaagagaaggtagtaagcagtaacgtagtactttgaaatatgtagttccgtgatagctcagtcggtagagcaaatgactgttaatcattgggtcccaggttcgagtcctggtcacggagccaatttcaatatcggggtatagcgcagtccggtagcgcgcctgctttgggagcaggatgtcgggagttcgaatccccctaccccgaccatatttgggtcgttagctcagttggtagagcagttggcttttaaccaattggtcgtaggttcgaatcccacacgacccaccatttttgagaccagttaacactggaatcgaatcttaagatcagaggccaaaagcactgatcgaagaaggcgactgaaaggtcgccttttttttaccggggtatagcgcagtccggtagcgcgcctgctttgggagcaggatgtcaggagttcgaatccccttaccccgaccatattaaaaatcctcgtatcgaaagatacggggattttttttgtgcgtgaaaaactcaagtccggtgaaaatcgaatgtgggagggggcttgcccccgatggcagtgtgtcagtcgacaaatcaatgactgcttcaccgcaatcgggggcaagccccctcccacatttattgagtggcctcaggggccgagttgtcagtgaagtttgagtcgcggctcggtcccacgcccaatcttgctgcccagcatcagcatcgccgtacggaagaacccatacagcgccatctggtgcatgcggtacagcgacacatagaacatccgcgccagccagccttccagcatcacgctgccggtgaggttgcccatcaagttacccaccgccgagaaccgcgacagcgagatcaacgagccgtagtcagtgtatttgtaagaaggcaggtccttgccttcgatacgcagcttcagcgacttggccagcaacgaggcctgctggtgagccgcctgggcccgtggggggacgttgcggtcggtgcccggttgtgggcaggcggcgcagtcgccgaaggcgaagatgttctcgtcgcgggtggtttgcagcgtcggcaatacctgcagttggttgatgcggttggtttccaggccatcgatgtccttgaggaagcccggcgcgcgaatgccggcggcccataccttgaggctggccgggatcacttggccactgctggtgatcagcgcatcggccgtcacttcgctgaccgccgagttggtcagtaccgtcactccaagcttctccagggttttatgcacaggcccgccgatacgctccggcagggccggcagtacacgtgggccggcttcgatcagggtgatgtgcatgttttccggcttgatacggtccaggccataggccgccagctcgtgggcggcgttatgcagctcggcggccagctcgaccccggtagcgccagcgccgacgatggcgacgctgattttttccaccacgtcagtctgcccggcatgggcgcgcaggtagtggttgagcaactgctggtggaagcgttcggcctgcttgcgggtgtcgaggaacaggcagtgctgcgccgcaccttcggtgccgaagtcgttggtggtgctgccgaccgcaatcaccaggctgtcatagcccagcacgcgcgcgggcaccagttcacggccttcttcgtcgagggtggcggccagctggatcttcttctgttcacgatcaagcccgctcatgcgccccagttggaactcgaagtggttccatttggcctgggcgacataattgagttcgtcttccgaagagttcaacgagccggccgccacttcgtgcagcagtggcttccagatatgggtcaggttggtgtccaccagcgtgatgctggcagtgccgcgcttgcctagagtcttacccaggcgggtagccaactccaggccgccggcgccgccgccgacgataataatacgatgggtcatggggatatctcgcaaggctaaaagaaatcggagcagttacccccgcgagcgccaggcagctcatagcgtcaggtaactcaaaaggcgactcagcaagccgaggccgatcaccacggcaagcaccacgccgaggagcagccacggccggaaaggcttgcgctcgactcggttctgggagagttgcaggtactcttcgacatgctgttggtcatcggggttcaggcggctggtcataaaggcctcgtcaggtagacgttgcaaaagggcgccacgttacagtcctggggctcagaggctgatacccacgtcgaacactatgctgcggcccaggttgttgcgcaagaaatccggtgcgtccgggtgggcgaacagcacccgtgcaaaggtcggccctaccagggacaacgagcgccagccctggcgcagatattccgtcggcggcggaaaatggctgttgaggtcgagcacttcgcgcttgaggctagtgaaggcgacgatatccagctcacccaggtccatcccgcgctctttatagttatgcgccttcttgcgcagcgtaggcgccaggcgcatcagaaactcgtgggccgggatgcgtcgcggcttggcttcgcgtcgtaccagttgactgagggagaacgcactgcgccggcgcagcaactcgtcgcgccactcgtcattcaggcgacggccctcgtccagcacgaaaaacacctcgaagctggcgtcgcgaaacagtacgtccggcggctcttgcccggcggcgtggaattcttcggcacggtagggcacgttcaagccttgcagcagacgctggcagacccaacgctcacgctcccatttgcgggcattggacaagaacgcattggcttgttcggccgctacggtgagcaggcgcaagtaatctgagtcatccatagcaagcagcttagcgcccaaatgatgaccgcaggaagtaccccggtgaaacgtcggtgtagactgatcatccgactcttattcgacccggggagtatcgccgtgatcagtgccgccctgttggcgccgacaaccatgggtctcggctggttgctgtatgcgccgctggtactgtgggcgatcctgcgttcgccgtgggtcgagctgttcgccgaccggcgccgtcagcatttgttgttcggcacggtgttcgcgttgttcatgctgtggctggtgcggcgggattttgataccggcgtgtcctaccacttcatcggcatgacggccgtaaccctgttgctggattggcccctggcaatcgtcggcggttttgccgcccagttgggcttgctgctgttggggcgccaggatctcgctgcccttggcctcaatggcctgttgctgatcgggctaccggtgctggtcactgaagcctgcgcgctgctggtcgagcgtgcgcaaccacgcaatccctttgtgtatatcttctgttccggttttttcgcggcagccctgtcggcactgttgtgcctgctgtgtgggctggggctgttgtggttcgacgggcgtttcgccatgccggaatggctggcggattttgtcggctacctgtggctgatcatcttccccgaggcctttatcaacggcatggtcatcagtgccctggtggtgttttgccctgaatggctggagaccttcaaccgcacgcgctacctctcggcgccttggaaggacgacgattcgcagcgttgacctggatcaaatcccgcgtcgacgagcaggcccatgctctgcgaaatttttccgggagcgcggatcatgagtgtgtacgaatgggcacggcaggagttacgcagaagccaggacgcggcacaggagatcggttttgacccaggactgactttgcgcgccatgctcagcgcggtggtgcaacagagcaaaggcgtgcgcagtttcgaagacttggccgacgagctgcaatacctcgcagaaaacctcgacgaccagcaggaatatgcctttatgcgcccttaatggcgcggcggcaggtcttcggaaaacagctcgtcttcggcatccggcgccacggggatcttgtgttcttcagcggcccaggcgcccaggtcgatgagtttgcagcggtccgaacagaacggccggttgaggttggtcgctttccattccacgggtgcgccgcaggttgggcagtcgacggtcaagggttggctcatgatcggcctccacgcaaagtaaggtaaaagtggtgcagtcgctcgacctcgctgtgcagccaggcaaggtcctgatcattgaccagtacgtcatcggcatgtttcaggcggtcttcgcggctcgattgggccttgaggatcgcctgcacctgttgttcgttgatgccgtcgcgctgcagggtacgctgaatctgcagcgattgcggcacatcgatcaccaggatgcgctgggtcatgctgtactggccggactcgatcagcagtggcgacaccaggatcgcgtaaggtgacgtcgcgcgcgccaggtggctgcggatctcctcgccaatcaacgggtgcagcagggcttcgagccagcgccgctcttcgggcacttcaaagatcagcttgcgcaatgcggcgcggtccaactggccgtctggctgcagcacgccggcaccgaaatgctcggcgatgtgcgccaatgctggccgaccaggctctaccacccagcgggcggcgtgatcggcgtccaccaggtcgatacccaggtcgataaagtgctgggccgccgcgcttttgccgctgccgatgccgccggtaaggccgagaatccagggtgttgcaacacgagtggtcatctgaaaccgacagactgcaaatagaagtcggttatttgaccaccccagagcaatgcaatccagccggcaatcgccagatacggaccaaatggcatcggtgccgacgcctgggacttgcgcaggcgcatcaggatcaagccggcgaataccccgaccagtgacgacatcaacagcgtcatcggcaggatctgccagccaccccaggcgcctagcagcgccagcaacttgaagtcgccgtggcccatgccgtccttgccggtgaccagcttgaatagccagaacacgctccacaggctcatgtatccgatcacggcgccccacagggcgtcggccaatgtcgtcagcaggccgaaactgttgacgatcagtcccagccacagcagtggcattaccagcacatccggcagcagttgatggtcggcgtcgatcaggctcatcgccaacaatccccagctcagcaccatcaccgttcccgcctgccagccaaagccgaaatgccaggccacccaggccgagatcaaagcgcatgccagttccgtgagggggtagcggatgctgatcgccccttggcaatgcgcgcagcggccgcgcagaaacaggtagctgagcagcgggatattttcccatgggcgtatgggatggttgcagcgcgggcagcaggagttgggctgcatcaggttgtaggtcggcccggctggttctgcgggcaagtccagcacttcatgggcctgggcgcgccattcccgctcgagcattttcggcaggcgccacaccagcacgttgagaaaactgccgacgatcagccccagcaccgccgccatcgccacaaacgcccagggatgctcccccagcagcaggctcaaaatgcgcttcccagttggaataccggcaggtacatggcaatcaccagcgcgccgacgatgccccccagtaccaccatgatcagaggctccatcaggctggtgaggtgatcgaccagggtgtccacatcggcctcgtaatggttggcgaccttctccagcatgcggtcaagcgtgcccgactcttcgccgatggccgtcatctggatggccatgccgggaaacagaccgctgacggccatcgattgattcagttgcatgccagtggatacatcgtgtcgcatatgctcgattgcctgtctgaacggcccagaaccggcggccccggccaccgagtccagcgcctgcaccaacggaacaccggcggcgaaggtagtggacagcgtgcgggcgtagcgggccacggccgattttctcagcagtttgcctgccaggggcgctttcaacaaaccggcatccagccacagccgaaaagccggtaaggcatggtaggcgtggcgcaacccaaaacctgcggcaagcaggcccagtgccacgccccaccaggctcgctgcatgaactcggacaaagcgatcacctgcaaggtgaagccgggcagtttgccgtcgactccggcgaacaggctttggaactgcggtactacgtggaccagcagcacgccggtgaccaggctggcgaccatcagcacggtgatcggataggtcatggcttttttgatcctggcctttaactgctcgctcttttcccgatgaatcgctacgcgctccagcaaggtttcaagagcaccggcctgttcgccggctgctaccaggttgcaatacaactcatcgaaatagcgtggatgcttgcgcaacgtgtcggcaaggctggtgcctgcggcgatggactgtttcaacccctctgtcagttcacgcagcgtgcggttgtcaaagccttcgccgatgatgtcgaaggcttgcagcagaggaatcccggccttcagcaaggtggccagttggcgcgtgagcagggtgatatccgccgatttgatagatggcttgaggcccgctagaactggagaatgcttgcgtacaagccctgggctgatgccttgccggcgcagctgagccttgaccagggctgggttgtgcccggcgctgtgcccggacaccctgcgccctttgcggttgatgccttcccaggcgtagatcgttgaagcgttgtccatgtcaccgttccgcacagaggtcgttgaagatttatagcttagtcaggtgacggattcgggcaggcgggcggtggtggataaaatgtcagaatgtgcgtcttgtgcgcgattgaccgcctgcggatgagtacactggcgccgctgcacaactcggggcgcaggaagcgccttgtcatgagttctatcctggagagtgaatgtgagacgtcaaaaaggttttaccctgatcgagctgctgattgtcgtggcaatcatcggcattttggccaccatcggcctgcccatgtacaccacccaccaggccaaggccaagttcaccgccggcctggctgaaatcaccgcgttgaagcccgggtatgaagacaccctcaaccaggggaccgtgccgaccttggcattgatcggcggcaccagccccaccgccaattgcaagatcgaagtggcaggcgatgtgaccaccggcgcgggcaccatcagttgcgaaatactcgacgcacctgcgccggtgctgggcaagaccatcagcctgacgcgcaacgccaccaccggttggaaatgcagcaccaccgctgaagccaaatatgttgccaagggctgcggcgccgacggggcatagctgctaaaccaaccacaggtaacttgaggtggccgatggcgttatccatacagcagcgtggcagtgttttcctggtgacagtggtgtgcctgctggtagtcggaatatgtgcacccttcagtgggcatgatctgcagcgggctatgcagattgccatcggggcgtgtgcggtgctgtatgggttatctgtcgtccctgtcggccaattgctggacaggccaaccgccctgggcctgatgctgattatcgtgcttggcctggtgtcttccacgttggcccatcagccgctctgggcactggccgaaatggcgctgtttgtcagttgcgggtcgattgccgtggcatttgccttgctgcgtcgtcatggcggcgagcctttggatcgcgccttggtcatggtggtggtgctgctgtgcctgatcaagtcgattcaatacctgtatgcgggcgcacttgtgttcatcaacgctgaacgtgtgctggaccctgacctgttgctgtccggtttttccaacaagcgcttctacggccagtttcagacattcacgctgccgttgctggcacttcctttgttaatcactgttacctctcgctcgctcaaaggcgcggtgtttgcgttgctgtgcgtgtggtggatgattgcgatcgccggtggtacgcgcggtacctggcttggcatgtgtgtggccggggctgtgctggcggtacttggcccctgggggcgacgatggctgggttggcaactggcggcagtgtttggcgggctgctgctgtactggctggtgtttgcgttaggggcggattacctggaagtcgaggtctccaagggcgccagtgaccgcctcaccaccaccctgtcgggtcgtggtccgatctggtggcaggcttggcatatgctcatcgagcgtccatggttgggcttcgggccgatgcattttgccgatattgccaatgaaatcgccgctcacccgcaccaggccatcctgcaatgggccagtgaatggggtgtgccatcggccttgtgcgtgatggctctggcgtggcgaggcggctgggcgacgttcggtgtgttgcgcgaacgagcgctctcgaacactcgcgctgatctgttgcggctatgcctgtttgcggccttggtaggggcgttggtgcagtccatggtcgacggtgtgatggtgatgcccaattcccaggtctggctggcgctggtggtgggctggctgatggcgttgcatgtgtggaaaaccccggaggccgccgcgttgccattggcctgggcagcctggaaagtgctgagtgtgctggccgtcggtctgctggtttttatcgcagctcgcgatgtgcctcacatcaagcaagcccagcagcagtacctgagcactcatgtcggcctgctgcaaccccgtttctgggcccagggcgtgattgcgcgctgaaggccgcaagttgccggacttccaatgcagtgctagctttagcccaccgcccgtgtagctcagccggtagagcagcgcactcgtaacgcgaaggtcgcaggttcgattcctgtctcgggcaaaaaggcaccatggcaacaccgttttcagatgatcccagaatggttctgaaggccagacgagccggcatttgagcctgctcttttgtatctgcgcaaccttgatgacccagatgcatccccattcctcgatctaagagaacaacatgaccacgactgaaatgacccaggaagttcggcatcaagcagccctcgaaaaatacctcgaggaatcgccgcagcttaaagaagagatcaaggacctgagcgccgatgatcagcgcgaccagattcagtgggcattcgaggacgaagccgagagccagggctatcagccttgggagctgaccctcaagtacacctcgacaccggaagaattcgaagcggcacgactggccttgcacaaagaggcggccgaagtgctgggtgtcgaatgggaagagtactgcgagatgaatgacctggtagtttagaagcagctgccagactcaagctgcaagctgcaagctgcaagttgtctcgcgtccctcttgcagcttgaagcctaatacttgcagctccttagatactcaggcgcatcgacaaatccaccgccttcacatccttggtcatcgcaccaatcgagatgtagtccaccccggtctcagcgatcggcaacagggtgttttcgttgatcccgccgctggcttccagcttggccttgccgccattgaggcgcacggcttcacgcatgtcttccaggctcaactcatccagcatgacgatgtccgcgtcagcggccagggcttcgcgcagttcatccagactttccacttcgatttccaccggcttgccgggagcaatccggtgcgcggccgcaatcgcctgggcaatgccaccgctggcagcaatatggttttccttgatcaggaacgcgtcatacaaaccgatacggtggttgtgacagccgccgcaggtcactgcgtacttctgcgccaggcgcaggcccggcagggttttgcgggtatccagcagcttgacctgggtgctggaaacaaagtccgccagaaattgggcacgcgtggcgacgccggacagcagttgcaggaaattcagtgcgcagcgttcgccgctgagcagcgagcgcgccgggccttcaaggtgaaatagcacttggttggggctgacacgttcaccatcggccacttgccaatgcacggcgacccgtgggtccagctggcggaacaccgcatccacccaggcggtgccggcgatcactgctgcatcgcgggtgatgatggtggccgtggccagccgttcggccgggatcaactgcgcagtgatgtcgccgctgccgatgtcttccagcagtgcgcggcgcacgttggcttcgatttcggcggtgaggtcggcaagacggagattcggcataacaggctccacagacaaagtgccccgattataggggcagtgcgcgtctgaacccagcgacctgctcatttaccgccaaatgacagagtgtgctggcgcaaacccccttgtttgcaagataatctcgcgccttgcaattggcgtcatagctttgacgtctcgctaaataccgccgtttcaggaggccaggatgcacaatgacggaaaggtggtgccaatcaagaaggcgcatgccacgccatcgccgctcgcccgactgccggtggtgttgctgcaggttcgcgacagagcggcgcaacagttgcagcaagggttgcaggaactgttcgataacgccgacgacacgctgttcgaaatggccgacaaggcgcgcaacaatcttgaccaccacattttctttgaagccatgcgtgatctgcgcctcaagcgcaagaatttcgagcgtgtgttcatggagcgtcttttcgacgcctttgccagtctgggccaggcagggcggggcgagctgcaactggtgccggtggtttcctacgacggggtgccgggttcaaccagggacgacctggaaaaagccgtggcgcttgaagccatgctgggtcgcgtgcgccaccgtgacggcctggctctcgcgcaacttacggcacgcttgagcgccttactgggcaaccgcctggatgatcgtgagaaccctctggggccggcgctgctgtgtgagtttttcctgcgggcggggcgcagcctgggcgtggagatccgcgtcaaactggtcatgctcaagctctttgaaaaatatgtgctcagtgacgccgaccagctatacggcgaagcgaatcaattgctggtcgcaaccggcgtcttgcctgaactcaagaccataccgtcccgacgcatcgatggacgtgtggcacctgagcatccgcgcgaagctacttcgccagtccccgaccggtccggtgacgaaaatggccaggaagccttcgccgcgcttcaaccgctgctcacggcggtgcgtggcagcgtggcgccgacgcttgaggccagcgccgagccgttgcctatttccacccaggacctgctgcgcctgctctcccatttgcagcagtacgtgccggagcctgagtcggaggacgatttcgacctgcgcagccagcttgaacagttgctcacccgtgtcagcgtcaagagtggtaagtcgcgggtggtggaggacgcggacgaagacgtgatcaatctggtcgcgctgctgtttgagttcatcctcaatgaccgtagcgtgcccgatgccttcaaggccttgatcggccgcttgcagattcccctgctgaaagtggcgttgctggacaagagtgttttcagtcgcagtggccacccggcgcgggggctgctcaatgaaatctcggccgccgccatgggctgcagcccgctggatgactaccaacgcgaccatctttacctgcgcatcgagcaggtggtgcagcgcttgctcaacgaatatgtcgaagatccggcgatcttttcccagttgctcgccgagttcagcgcgtttaccgccgacgagcggcggcgcagcgacttgctcgaacaacacacccgggatgccgaagccgggcgcgtgcgcactgaagccgcccgccagcgcgtggccgatgtgctgaataaacggctgttgggcaaagtcctgccgcgtcctgtggtgcagttcctgcaacaggcctggagccaagtgttgctgttggcgagcctcaagcacggcgagcagtcagtgcaatggcaagcggggctgcgcaccatggacgaactgatctggagcgtcggcctgcagcaggacaccgaggccgggcggcgtttgctggaccagctaccaggcttgctcaaggccttgcgcgacggcttgaccagtgccgcgttcgaccccttcagcacccgcgaattttttgtgcgcttgcaggcgttgcatatccaggcgcctgaaggtgttgatgagctgatcgaggtgcgtgagccatttgtgctgagtacggcgtcacccgacccggtcaccgagctgtcgggtaacgaccctgacctgtacaaggctctccaacttaaagtgggcgactgggtagtattccaggaaggccaggccagcacgctgcgctgcaagctgacagcgatcatggcgccggccaacacttatgtgttcatcagccgcacggggctcaaggtattggagaagagtgccggtcaattggcaatggcgttcaagtgtggcgcactgcaaacgctggaagacgggccattgttcgagcgtgccctgacggccgtggtgggcaaactgcatcaactcaatcgcggcaagtgatcgcaaccggagggtcgaacgcggcatactggtcacactttgtattgttcaaggaacctgtatgcagttggaccccaccagcggttggtgccggggcatccatcattgcccttcgcccaacttcaacgagcgccccgccggcgaaatctcactgttggtggtgcataacatcagcctgccaccggcgcagttcgccactggcaaagtgcaggaatttttccagaaccgcctggatgtcacggaacatccctactttgaagggattgccgacctacgggtatctgcgcattttctgattgagcgtgatggcgcggtgacgcagtttgtgtcctgcatcgaccgtgcctggcacgccggggtgtcgtatttcgaggggcgcgacacctgcaatgatttttccgtcgggatagagctggagggcacggatgacctgccgttcaccgacgctcaatatgcagcactgatcgacctgacccgccagttgctggtggcttacccaagcatcaccccccagcgcatttgtggccacagcgatatcgctccgggacgcaagaccgaccccggccccgcttttgattggacgcgctttcgcagcgccctgcaggatggagaacacgcacgatgagtttcctggtgttggtgctggctgtatggatcgagaagttttcggccctgcgccagcggttgcagcgagatggcggttggttgcgcgaactggccaagctggaatcgagcccgcgcatgggcaagcagccctggctgattctgacgttgctggtgttgttgccggtggccttgctggcgctgttgctgctggtgctggagccggtggcgtacggactgctggcgctaccggtgcacctgctggtggtgatctacagcctggggcgtggtgacctgctcgctgggctaggtccgttccgcgatgcctggcgacgcggtgacctgcaggccgccgagcatgtggccgaacgtgacctgagcctgagcgccgacagtggcgagcaattgctcgaacgcgttcagggccatctgttgtggcaggcctaccagagcttttttgcggtgattttctggtacttcctgctgggcccggttgccgctctggcttatcggctgctcgcactggccagtgagcacagcaagaaccccttggtggccgagcgggccgggcaactgcgccacgcgttcgattggctgccggttcgcctgctggcggccagctttgcgctggtcggcaatttcgttgccgtcagccgtgtgatgctccatgagctgctgagctgggacatcagcgccgcccagctggtggaaaaagtcggcctggtcgccgccgaaatcccaccccctgcggtcggccccgatggcatcaacagcctcgaccgactctgggaactgctgctgcgcgcagcggtgttgtggtacgccggcttcgccatctggaccgtcctaccctgaccctgtagaagccggctcgccgtagtgagcagtcttgcctgtggcgagcgggcttgccccgcgctgggctgcgaagcagccccccccatccattaaccttaagttacaaaactccctttcaaattgagctatacagatgctggctaactgccgccctgcacctcaataaaaataaaagaaagggagttcacctgtgaagagcttgctctatcccgccgtcgccctgatgaatcgcctgagcttcggcatgaagttcagcctgatcagtgtgttgttcctgctgccgatgctggcgaccaactcttatctggtgcgtgactcgtggcgtgaattccaaggcacccgcgtggaactgcaaagcctcgatttacttggcagcagcctgaccctgcgccgcgacctggaaaccctcaacaaccaggtgcagatcaacgccaccctcggccagtccggcaaggccggcgatcttgaaggcaagatcagcgccctggaacaaagcgtgctcaaccgcctgcaaggtctcaacgccatggctaccgagcctgagcagattgcggtttttgatgctaagcgtgaggagttgatcgcagccttcaagacccagcaacaggaaacgtcgctgctgagcaaaagcgcgctgatcggcaagttgctcaacaaatcgcagatgctcagccagatcatcgccagccaatccgggctgagccgcgactcccagagcgacctgcgccaactcagcgagctgatcaccagcgtcaccccgcaagtcacccaggccctgggccaaggccgggcgatgggtgcgtattccctgggccagggctttctcaattcttcgtccagcacgcggtttgacgagcttttgcagcaactggaaaaactccaggccgaatatggcctgaagttgcaggatgccctgggctccagcaccgcagcccacgcggcactcgacaacctggccaaagccagcaacgccagcctcaagcatggcagtgagttgtttgaggagcaggtggtgatggccgagaccctcgacgcaccctggcagggtttttacgacagcgtcagccagttgatggcccagacctatcagttggatgacgcgaccctggcgttcctcgggcagcagttggagcaacgcctggcgcaaaaccgcacgcacatggtggtactggtctcggccctgagcgcggtgtttttgttgatcttctatttgtacgccggtttctacgcgtccacccgcaccacgctgcgacgcctgggcgcgatgatggacaaggtggcagccggcgacatgaccgtcacttttgttgcacatagtcgcgacgagttgggcgacctgggccaggtgttcaacggcaccgtggcgaagatccatgacctgatcgagcgcgtcgggcacaccgtcagccaggtcgagctccaggccggccaggtggaaacagtctcggcccaaagcaaccaggccgtgtccgggcagcgtagtcagatcgagcaggtggccacggccatgaaccagatgtcgtccaccgcccaggaagttgcgcgcagtgcggcggcggccgtcagcagtgcccacagcgtcaatgacgaaactgtcagcggccgtggcctggtgcaatcccagcagggcagcattgcgcggctggcttcggaaatcgatcagtcggtgcaggttatcaaccaattggctaccgacagccagtccatcagcagcgtcctggaggtgatcaaaagcattgccgagcaaaccaacctgctggcactcaatgccgccatcgaagccgcgcgggccggtgaacaggggcgtggttttgcggtggtggccgacgaagtgcgcactctggcccggcgtactcagcattccaccgaagaaatcgaacagatgatcagccgcctgcacagcggtgtggccgccgccgtgaaggccatgggtaccagccatgccatggccaatggcacggtagggcaatcggaaaaggtccagcaggccttggaaaatattctcggtgccgtgggaatgatcgtcgaccagaaccagcagatcgctgccgccgtggagcaacagaccgccgttgcccatgacattgaccagaacatcgtcgaaatcaatcgcgccggcgagcatgcggcccagggcgcccaccagaccgaagcggcgagccggcagctgtcgatgcaggtgattgagttgaggcaattgatcggcgcgtttcgagtgtaggaattgtaggtagggcgtattgcttacgggtgtagtgcttgtcctgatttccctgcgtgtcttttctggcggcgtgaatgggtgagaatttgtttcagacaaattcacgttcaggggagcacgacgatgaccattgcagtcggcatcaaagggcattgcgcccattgtgatatcaggtttgagctcaagccctggcagctgaatgccatcgccatcgaagagcccttcgattgcccgtattgccggcagttcttgcaattgagttgccctcggcaattgcgggcgttcaagctgttgggccattgggcgctggtgcagccgagcatggcggtgttcacctgcatggtgctgatcgtggccctggtcacggaatgggtggggctgatcacggtgatcgggcagttcaacgtgtcactggtggtgctgctggtgcatttcctggcgctgcgctatgcccgttaccggcagcggatcacgttggacctgcaagtggtcacgccagtcttaccaattgaacagctcgcacgcattgcgtgtgctcgcctcagccaacgatagcgcgctgatgcccatgcgctcggccagggcggtgcagatggccggcaggtgttcggggctgttgcgttggccggggaacatggccggcgccatatccggtgagtcggtttccagcaccaccgattccagcggcagttgcgccagcaccttgtgcatgcgcaaggcctggggccaggtgggggcgccgcccaaccccagtttgaagccgagcttgatgtactcccgagcctcttcgtggctgccggcaaacgcatggatgatgccgccgcggggcaggcggatgcgcttgagggtggcgatcacggcggcgtggctgcggcgcacgtgcagcaacgccggcagttggaactccacggccagtttgagctgggcttcaaacaggctttgctggcgttcgcggtccagctgttcgagaaagtaatccaggccgatctcgcccactgcacacagttgcccgtggccgtgcaggcgcgtcaaccaatcgcccaacgccgtcaggtcagcggggcgatggtcgtcgaggtacaccgggtgcaggccaaaggcggcgaacaaaccttcgtccgcttgcaccaggtcccacagcctttgccaattctgctgatacacccccaacaccaccatgcgccgcacgcccagcgctcggctgtgggcgaggacttcccggcgatcgctgtcgaaatccgggaagtccaggtgcgtatgggtgtcgatcaactccacgctcaagcctcgtgaatacgctgcttgaacgtccggccgatggcatgcaccccaggttggtactgttcttcttcgatcgcggccagcgccaggcgcagggcggtatcggcgatcagttggtgctgctgggccatggcgttgaccggcagcggcaggaagtccagcaattgggtatcaccaaaggtgcccaggcgcagcgggcgcgtcttgagcgggaagtcatgcagcgcgtcgaacacgccttgcagcagcacgtaggacgtggtcaccagcgcgtcaggcaaatgccccagttgctgtagaagttgctccatcagctgtcggccgcagtcgcgactgaacgcttccgcgtgttcgacgatcacctcgccgctgaacccggcaagggcttcacggaaaccggcggcgcgttcctggctgatgctcaattcgggccgtgcgccgatcagcacaatctgcttgggcagcggttgcagcaggctgctggtcaactgctggcaggcctggcggtcatcgctgaccaccgaacagaactgatccgcacccatcacccggtcgatggcaatcaccggcaaccccttggcttgcagctcgcgataactgtcatcgctggcgggcaggcaactggcgacgaacagcgcatcacaacgccgcgcgcggaacagctgcagcaactggcgttcgctgtcggcgtcatcgtcggagctggcgatcagcaactgatagccgcgcgcccgtgcgccttgctccaggagcttggcgatacgtgcgtaactggggttttccagatcgggcaggatgaagcccaaggtgcgcgtgtgccgactgcgcagcccggcggcctgtgggttgggggtaaagccatgggcttcgacgacagcccgcacccgttcgacggtggcgttgctgatgcgctgctgttcggccttgccattgatgacgtagctggcggtggttacggacacaccggccaggcgggcgatatcactgagtttcaaaccgggatttccttgttttctggagcttgccccgacattttgtccaatcgtaaccgattccagcactcgaccaatgtctcagctcaagtgccgagtggttgttcaaggatgcgcaattaacgcgtaatctgccataaattctagattaaacgtttcagccagcgtatttttacgacgttcgcgactgagtagctactgccaactgactgctcagtcagctattgatgcacacccattacactgtttgtttaaaacaatacctagtgcggtcaccgcactaactaggagaacggcatgcttgagctcactgtagagcagatttccatgggccaggtggctgtggataaatctgctgccttgcacctgctcgctgacaaactggtggccgacggcctggtcgccgagggttatctcagtggcttgcaggcccgtgaagcccaaggctcgacctttctcggccaaggtattgccatccctcacggcaccccggaaacccgcgaccaggtgttctccaccggcgtgcgcctgctgcagttccctgaaggggtggactggggcgacggccagatcgtgtacctggccattggcattgccgccaaatccgacgaacacctgcgcctgttgcaactgctcacccgtgcccttggcgaaaccgacctgggccaggcattgcgccgtgccggaagcgccgaagtcctgctgaaactgctgcaaggcgcaccgcaggaactggcgctggatgcgcagatgatcagcctgggtgtgtccgccgacgacttcgaagagttggtctggcgcggcgcacgcctgttgcgccaggccgattgtgtgagcaatggtttcgccgccgtgttgcagcaggtcgacgcgttgcccctgggcgatggcctgtggtggttgcacagcgaacagaccgtcaagcgcccgggcctggcgttcgtcaccccggacaaacccatgcgttacctcggccagccgctccatggcctgttctgcctggccagtctcggcgaagcccaccaaacgctgttggagcgcctgtgcgccttgctcatcgaaggtcgcggccaggaactgggccgtgccaccagcagccgcgcggtgctcgaagtgcttggcggcgaactgcccccggactggcccagcgctcgcatcaccctggccaacgcccacggtttgcacgcgcgcccggcgaagatcctcgcgcagttggcgaaaagttttgatggcgacatccgcgtacgcatcgtcgatggcccggtcggcgccgtgtcggtgaaaagcctgagcaaactgctgagcctcggcgcacggcgtggccaggtgctggagttcgtcgccgagccgacgattgccggcgatgcgctgcccgcgttgctcgccgctgtgggggaaggcctcggtgaagaggtcgagccgctaccgacggtcagcgcccaacccgccgccctggatatcgagccggttgtcagtgcgccgaccagcggcagccagatccaggccattgccgctgcaccaggcatcgccatcggcccggcacatatccagatccagcaaacgttcgactatcctctgcgcggcgagtcctccgcgatcgagcgccaacgcctgcacagcgccctcggcgaagtgcgccgcgacatccagggcctgatcgagcgcagcccatccaaagcgatccgcgagattttcatcacccaccaggagatgctcgacgacccggaactcaccgacgaagtcgacactcgcctcaagcagggcgaaagcgccgaagcggcgtggatgagtgtgatcgaggcggccgccaggcagcaggagtcgttgcaggacgccttgctcgccgagcgcgccgccgacctgcgtgacatcggccgccgtgtattggcgcaactgtgcggcgtcgaaaccgtccaggagccgagccagccctacatcttggtaatggacgaggtcgggccgtcggacgtggcacgtcttgaccccgcgcgcgtcgctggcatcctcaccgcccgtggcggcgcgacggcccacagcgccatcgtcgcccgtgccctgggtatcccggcgctggtcggcgcgggcccggcggtattgctgctggcctccggcacccccctgttgctggatggccagcgcggtcgcctgcatgtcgaccccgacgccgccaccctgcaacgcgccacggtcgagcgcgacacccgcgaacaacgcctgcaagccgcttcggcgcaacgccacgaaccggcgctgacccgcgacggccatgccgtggaagtgttcgccaacatcggcgaaagcgccggtgtcgccggcgcggtggagcagggcgccgaaggcatcggcctgctgcgcaccgaactgattttcatggcccacccgcaagcgccggacgaagccacccaggaagccgaataccgccgcgtgctcgacggtcttggcggtcgcccgctggtagtgcgtactctcgatgtgggcggcgacaaaccgttgccgtattggccgattgccgaggaagaaaaccccttccttggcgtgcgcggcatccgtctcaccctgcaacgcccgcagatcatggaagcacaattgcgcgcgctgttacggtccgccgatagccgcccgctgcgcatcatgttccccatggtcggcagcgtcgacgaatggcgtgccgcccgtgatatgaccgagcgcctgcgcctggaaatcccggtggcggacctgcaactggggatcatgatcgaagtgccgtcggcggccttgctcgcaccggtactggccaaggaagtggactttttcagcgtcggcaccaacgacctgacccagtacaccctggccatcgaccgcggtcaccccaccttgtccgcccaggccgatggcctgcacccggcggtactgcaactgatcgacatcaccgtgcgcgccgcccatgcccatggcaaatgggtgggggtgtgcggcgaattggcagcagacccgctggcggtgccggtgctgatcggcctgggtgtggatgagttgagcgtgtcggcccgcagcattcccgaggtgaaggcgcgggtgcgtgaattcagtctgagcgaggcccagggcctggcgcaacaagcactggcggtgggctcgcccgccgaagtgcgtgccctagtggaggccgtgtagatggcaaggattctgaccctgacgctgaacccggcgttggacctgacggtgcgcctggcgcacctggaaccgggtgaagtgaaccgcagcgaaaccctgctgacccatgcagccggcaagggtgtgaatgtggcgcaggtgctggcggatttgggccatcaggtgagcgtgggcggtttcctcggcgaggcaaacccccaggccttcgagacactgatcgcccgccgtgggtttggtgacgcgttcattcgcgtgccgggcgaaacccgcagcaatatcaagattgccgaacaggacggccgggtcaccgatatcaatgcgccggggccgcaggtcagtgacgcggcacaagccgcgctgctcaagcgcatcgccgacatcggcgtgcaattcgatgcggtggtggtcgccggcagtttgccgcgtggcatcagcccgcagtggttccaggggctgttgcagcaactgaaaaacctcgggttgaaagtcgccctggacaccagcggcgaagcgctgcgcgccggtttgaaagcggggccgtggatggtcaagcccaacaccgaagagctggccgatgccctggggcatgccccggatgcaatcagccaactgcatcggcaaggcgtggaacatgtggtggtttccgatggcgctgccggcgtcacctggtatcgcccaggcgcggcgctgcaggccacgccgccaaaggtgatggtggccagtaccgtcggtgccggcgactcgctgctggccggcatgctgcacggtctgctcagtggcgatacgccggagcagaccctgcgccgcgctacggcgattgccgcgatggcagtgacgcagatcggttttggcatcagcgatgacgcgcagttggcgcgcctcgaaagcggcgtccacgtacgcacgctgacagaacaataagagggtttgtgatgaagttagccattgttactgcctgcccgaacggcatggtcaccagtgtgctgtgcgcccgcttgttggacgccgccgcgcagcgccagggctggagtaccagcgtcgaagtggtggatgtacagcgcccggagcgccaattgtcccaggcggtcatcgacgacgccgaatgggtgttgctggtcagcagcaccccggtggacatgcagcgctttgtcggcaagcgcgtgttcgagagcacaccggcccaggcgttggcggacgtcgacgccgtattgcgccgtggcaccgaagaggcgcaggtgtatgtcgcggctgaggcgccggccaggaacgcgccgcgcatcgtcgcgatcaccgcctgcccgaccggcgtcgcccataccttcatggccgccgaagcgttgcagcagacggccaagcgcctgggctatgacttgcaggtcgagacccagggttcggtcggcgcgcgcacgccattgagcgccgaagcgatcgccaatgccgacgtggtgttgctggccgccgatatcgaagtcgccaccgagcgcttcgccggcaagaagatctaccgatgtggcaccggcattgccctcaagcagtccgaagccaccctcaacaaggcccttgccgaaggtgcggtggaaagcgcggccagcggcgcggtgaccaagccggaaaaaaccggcgtgtacaaacacctgcttaccggtgtgtcgttcatgttgccgatggtggtggcaggcgggttgttgatcgccttgtcgttcgtgttcggtatccacgcctttgaacaggaaggcaccctggcggctgcgctgaaaaccgtcggcgaccgcgccttcatgctgatggtgccgctgctggcgggctacatcgcctactcgattgccgaccgtccgggcatcgcgccgggcatgattggcggcctgctggccggcaccctgggtgcaggttttatcggcggcatcttcgccggtttcctcgccggctactgcgtcaagttgatcacccgtgcggtgaagttgccgcagagcctggaggcgctcaagccgatcctgatcatcccgttgctggcgagcttgttcaccggcctggcgatgatctacctggtggggccgccggtcgcgcgcatgctggtggggctgactgattttctcagcaccatgggcacgaccaatgcggtactgctgggcatcctgctgggcggcatgatgtgtgtcgacctcggtggaccgatcaacaaggcggcctacgcattttctgtcggcctgctggcggcccacagcggcgcgccgatggccgcgaccatggcggccggcatggtgccgccgatcggcatgggtatcgcgaccttcctggcgcgccgcaagtttgcccagaccgagcgcgaagcgggcaaggcggcgatgatcctcggcttgtgcttcatctctgaaggcgcgatcccgtttgccgcgaaagacccgttgcgcgtgatcccgtccagtatcgccggcggtgcattgaccggtgccctgtccatgtacttcggctgcgtgctcgccgcgccccatggtggcctgtttgtgctggtgatcccgaatgcgatgaaccatgcgctgctgtacctgctggcaattgtcgccggcagcctgctgaccggcctggtctacgcgttgatcaaacgccccgaagcgcaagaactgactgtgacggtctgacgcggtgcagaaaatgtgggagggggcttgcccccgatagcggtgggtcagccataaatgtgctggctgacactctgccatcgggggcaagccccctcccaccgttgatcgctgtataggcgtcatctctgcttcatcggggcgtgctttagtggcccttttgatactcaagagggcacctgcatgagccacttcgatctcggccgccgccgcgtgatgcaagccgtcggcgccggcctgttgttgccgggcctggctccggcggtgatcgcttcggtcaaggaccggccgcagctcaccgatggcgtgcagtccggcgacctgctcggcgaccgcgccatgatctggagccgcagcgaccgcccggccaggatggtggtggagtgggacacccgcagtgtgttcagcaaccctcgtcggtttatatctccgctggccgaccagcgcagcgacttcaccgcccgcgtcgagctcaccgggctgcccgtcgaccaggcgatcttctaccgcgtgcacttcgaggatgcccagaccggcatcgccagcgagccgtggttcggccatctgcgtagcgtgccgcaacagcgccgcgacattcgttttgtgtggagcggcgacaccgtcggccaaggcttcggcatcaacccggacatcggcggcatgcgcatttacgaagccatgcgcctgcgcttgccggacttttttatccacagcggcgacaccatctacgccgacggccccgtgcccgcgcagctcaccgtcgaagacgggcgcatctggcgcaatatcaccactgaggccaagagcaaagtcgccgaaaccctcgacgaatatcgtggtaattaccgctacaacctgatggatgaaaacgtgcgccgcttcaacgccgaggtgccgcagatctggcagtgggacgatcatgaagtggtgaacaactggtcgccgagcaagcagttggatgagcgctatcgggtcaaggacatcaataccctggtcggccgtgcgcgccaggcctggctggaatactcaccgatgcgccggcaggcggcggacggcggcgggcggatctatcgcaagctcagctatggtccgctgctggatgtattcgtgctggacatgcgcagttatcgcgggcccaacgatgacaacctcggcggcgcaaaacccttcctcgggcgtgagcaattggactggctcaagcgtgaactcaagggctcccaggcgcagtggaaagtcatcgctgccgacatgcccatcggcctcggcgtacccgacggtgaagtcagccctggcgtaccgcgttgggaagccatcgccaacaacgagcctggtgcgccgcaaggccgcgaattggaaatcgccgagctgctgggctttttaagggcacaaaacgtgcgcaaccacgtgtggctgaccgctgatgtgcactactgcgcagcgcaccactaccacccggatcgggcggcgttccaggatttcgaaccgttctgggagtttgtcgccgggccgttgaacgcggggagtttcgggcctaatccgctggacaagacctttggccccgaagtggtgttcgagaaggcaccgccggcgcagaacacctcgccgctggcggggtttcagttttttggggaggtgaacattgatgggcagacggcggagttgactgtggtgctacgggacctggatggcgtctcggtgttcgaacaaaaactccagcccacctgaattggaacgctttgaaaactgtgggagggggcttgcccccgatgagggcgtatcagtctctgactgagctattgatacaccgctatcgggggcaagccccctcccacaggttgagtgttgttcgttcagggggtcagtacacatctcggcgatagcggccctgctcgatcaaccgctccacggcctcactgccgaggatgtccaccagcgtctgatccacccccgtggccatcccctgcaaactcccgcacacataaatcgccgcaccatcggccagccatttgcgcagcacatccgctgactcgcgcaggcggtcctgtacgtagatcttctcctcctgatcgcgggaaaacgccaggtcgagcaacgccagatcgccgctggccaaccagccttgcagttcgtcctggcagaggaagtcatgcttgatattgcgctcgccaaacagcaaccagttgcgctgctggccgtcggcgatacgtgccttgagcaaactgcgcaggcccgccaggccggtgccgttgcccagcaggatcagtggtaccggcgcctgcggcaggtggaacgcgctgttgcggcgcaggcgcaggctgatgttcgagccgagggcggcgtattcggtcagccagcctgagcccaggcccaggctgccatcggggtggcgttcctggcgcacgatcagttccagcacgccatcgctggcaatcgaggcgatggagtattcgcgcatgcccagcggcaccaacgcgtccaccagtgcctgggcgtgcaggccgaccaggtgtgcgcgatgggtcggcagttggcgagtggccagagcctggtcgagcgtatgcgccatgccgtcgatcaacacgccgtcgctgccggccaggcccaagccttcgaggaagtgttcgatggcccaggggcaattgcgcggcagcacttccaccaggtcgccggcttgccagctttgtggcgacggcgaggtgaggcccagcagatagacgtccgagccgctgctgtcgcggttgagcaatgagcgctggctgagcgtccagttttcatactgggcggtcggccacgcggatgcgggggcatggccggtcagttggccgagttgctgctgccagtgaagcagggcggtggtgtcgccgctgtcgacttccacgggcgcaaacagtgggttgccgccctggtttgtcagccagaaatgcaggcggcgggcaaagccgcagaaatgttcgtactggcgatcacccagggccagcaccgagtagttcaggcccttgagggacaggtcctggccgagcacgctgcgctcgaaaccacgggcactgtcgggggcttcgccgtcgccgaaggtgctgactacaaacagcgcgttttccgactggcgcaggtcgtcctggctgacgctgcccaggggctgcaccttcaccggcaggccggccgcctgtaattgccccgccgtttgccaggcaagctgttcggcaaagccgctctggctggcaaagccgatcagccacgcaggggcatcgctgtggttggcggtgaggccgttgcgcgcgtcacgcacctggcgttttttgcgccggcggtccaggtacagcagccagccggtgatgaagaacaatggcatcagcaccgagctgagtgtgaggacaatccgcccgatcaaaccgaagtagctgccggtgtgcagcgcatagacgctggtcagcagtctggaaccgaggcttttgctggcgtactgatcgtgggacttgatctcgccagtggccgggtcgaggttgatctggttcagtgcccggtcatggggcgagtttttcagcaggtaatagacggtagccggctgcccggcgaccgctggcatgcggatgttataggcgctcaaacctgggccggcgttgctgtagatgctgctccagatcgcgtcgtagttggccaccggtgccgcaccctcgggcgccgggccgcgcttgcgcacccgttcgttttgcggggcgtcggacagcagtctggtcaggccctggctgtaccagtcgtaggaccaatacaagccggtcagcgccgacagcaggtaggccagcaggcaccaggtgccgaacaccgagtgcaggtcccagttgaaggcccggccttttttgcgccagtccagcgtcagccaggcgcgccagctcgccacctggcgcggccagcgcaggtacaggccggacaggcagaagaacaccaggatcagtgtgcatgcgccggtgatgttgcgcccggtgtcacccatcaccaggaaacggtggaactgcagcaggaagccaaagaggtcctgaccgaccacatcacccatgtagtcgccggtgtagggatcgaaatagcgcaactggccacggcgctcgccgggtggcggcgtgaagaacacgcgggcggcgttgccgctctcactttccacgaacagcatggccacggtctggccttcggtggcctccagcttgcgcaccagctcggcgggcggcagtacgccggcttcgcgtttttccacggtcagtacgctggggttgagcgcccgcagtatttcatcctgaaacgagaccgcagccccgctgatccccatcaaggccagcaccagcccggctgtaatgccgaagaaccagtgcaactggaacagggttttcttcaacacgtctgaccgcctcgtctatccggatatgtagggcacggcgcgcattatgccgtggcttgtcgagaaacattctgttttacacgcaaaagccccacgcatccgatgcgtggggctctttgctgcgtggtgctgctgtttagaagtggaagctggtggtcaacaaggccgtacgaccggccgcctggttggcgaagtgggtggagaaggctttgtcgtaatacagcttgtccgtcaggttctgcacgttcaattgcaggtcgacgttcttggtcagcttgtaactggccatggcgtcgtagcgggtgtaagacggtacgtaaacggtgttgcccgcatcgccataaacctggtcgacgtagaacgcgccgccgccgatggtgagcttggaggtgacgtcgtaggtggtccacaggctgaaggtgttcttcggcgtgttgggcatttggttgcctttgttggagcccgcgctgaccacaccgttacgcccgttcaggccggatttgaccagttcgctgtcgaggtagctgtagccagcgaacacctgccattggtcggtgagcttgccgctggcggacaattccacgccgtcgacctgggactcacccgcattctgataggtcagggcgtcgactaggatgcgcgtatttttcttctcggtacggaacaccgcggcggtcagggacaggcggtcgtggaacaggtcccacttggtgcccagttcgtagttgacggtttcttccggctgcaagtcgctgctggcggcgccggcagacagagggttgccgtctgaaccttcaccgaccagccccccggcaggcgtcgccgatgtcgcgtaggaagcatagatgctggcgttttccaccggcttccagaccaggccggcttgccagttgaagaactggctgtcttccttgattttgctgcggccggtcgcggagtcggtgttggccacggtgtcgaaggtgtcgtagcgcaggccgacgttcagcaaccacttcgggtctagctcgatggtgtcgaacacataagcgccacggctggtggccttggtggcggtgccgtagtagttgcgggcgatgctgccggtccaggcatcatccgggttcggattgctcagggaggtgcactggccgcccaggctacccttggccacggtgcagactgggttggcgttggggctgatggtgtagctgctgacgcgggtttcttcaccggtgaactccaggccggtagagtagctgtgtttgaagcccagcgcctggaagctgccgaacaggtcggtctggttggtggtggtggtcgtggtcgacacccggctgttggcgcgacgccacacggtgccatagcggttgacgttgaatttgctgtcgtccggctgggtgagaatgtagtcctggccggtgctgccatggcgcagggtatttttcagcgtcatggtgtcgctcaggtcgtgctcgatggagaacgtgctgatatcggcgcgggtcttgcggaagtcgcgatccttgaggccgtagaagttgttgctgtcgccgccgtcggtgggtttgtcatgcacatgggcggtggcggtcgacgaaccatagccgtagggaatccccgaatccggcaggtcatcgctttccaggtggtagtagctgaggttgacacgggtcggggtgcccaggccaaaggtcagcgacggggccacgccccagcggtcgtaattgaccgcgtcgcggccggcgacgttctgttcatggctcatcaggttcaggcggaacgcggcgctgtcgtcgaggaactggcggttcacgtcgagcacgtagcggcgggtctggtccgaaccgtaggtgaagccgccgttggtgaagtcccgcgcttgtggggtcttgctcaccaggttgaggctgccaccggcagaaccacgaccgccgaacgaagagttcgggcctttgctgacttcgatcgattcgatgtcgaagatctcacggctctggccaccagtgtcgcgcacgccgtccaggtaggtgtcgccctgggcatcaaaaccacggatgaacgggcggtcgccctgggggttaccgccttcgcccgcaccaaaggtgatgcccggcacggtgcgcaaggcatcctgcaacgaggtggcggcggtgtccttgagtacttgttgcggcaccacggtgaccgagcgcggggtatccaccaacggtgcggtgtatttctgcgacgaggctttttcgacctggtaggaggtgttgtcctgcgcttccccggtgatgctggtggcgcccagggaaatgctgttgcgctggcctttttgttcagtctcttcggcggcctgtgccagatgggcgacagagctggcgctgagggcaacgccgatggctgaagccagcatgcgtggtgaaccggcaggtatttttgtagtggtgcgcgacatgacgtgtcctttccccaaggatgtgaggccgcggaatatagggcgaacaagactttctatcaattgcgatacattgctaattgcactgaatttacattctttacacttttggcttacggtttttacgaactcgttcgtctcagcgttttacagagtggataagaatcaataccattggcgcctccccgttttcaggtactgccccatgctgctgcacatccccggcctgttctctcgtgaggaagtgcagcgcattcgccaggccctggaaaacgccgattgggccgacggtaaaatcaccgccgggcaccagtccgccaaggccaagcacaacctgcaattgcccgagggccacccgctggccaaggaaattggcgcggcgatgcttgaacggctgtggcagaacccgttgtttatgtcagcggcgttaccgcataaggtgtttccaccgctgctcaattgctacacggcgggcggcagtttcgactttcatatcgacaacgccgtgcgccaatgcaagggcagccacgagcgtgtgcgcaccgacctgtcatccacgctgttcttcagcgaccccgacgaatacgacggcggcgaactggagatccaggacaccttcggcttgcagcgcgtaaagttgccggccggcgacatggtgctgtaccccggctccagcctgcacaaagtcaacgccgtgacccgtggcgcacgctatgcctcattcttctggacccagagcctggtgcgcgaagacagccagcgcaccctgctgtttgaaatggacggtgcgatccagcaactgacccgcgatgtgcctgaccatcctgcgctgatccaactcaccggcacgtatcacaacctgctgcgccgctgggtcgaggtctgacatgggctttttattacgccgggaagaagtgctcaacgccgagcaactgcaagcgatgctcgacgattcccccgtgcgcgcagcccaggcgatcctgatggcggcgaaggagggggtcgtcgatgcccaggcgttgctcgggcagatcttgctggaagggcgcggcattgcacgcgatgaggcattggccttgcgctggttccagatcgctgcacacagcgggcatttgatggcccgcaacatggctgggcgttgccgcgagcatggctggggatgtgatgtcgacgaggcggcagctgcacgggaataccgggtggctgccgaggcagggttggattgggggcagtacaactacgccaatctgctggctacggggcgcggtgtcgccgaggaccaaccacaagcattggcctgttatcgccgggcggccgagcaggggcatgccaagtcgatgaacctgctggggcgttacctggaagatggccggttctgcccacaggacctgcacgctgctgtggactggtatcgacgctcagccgaggccggagattttcgcgggcagttcagctatgcggcggtgctggccgacagaggtcagatcgacgcggcactgcagtggttgcgcaaggcgttggcgggcgggaacctgaagttcttgcgtgtggcgtacaaggccctggtagcggcgaatgacccgcagatccgggcgatggccgatgcctatcaacaacgtgccatcagcctttcttaaggcgtaaaaaaacccatgacatgtcatgggttttttatgtgcggcctttttacacgtagaacgatttcagtggcggaaagccattgaactccaccgcgctgtagctggtggtgtacgcaccggtcgacagccagtacaagcggtcaccaatcgccaggttcagcggcaggccgtacttgtagttttcgtacatgatgtcggcgctgtcgcaggtgggaccggcgatgaccacttcttccatctcgcctttcttctcggtccagatcgggaacttgatggcttcgtccatggtttcgatcaggccggagaacttgcccacgtccgtgtacacccaacgctcgacggcggtacgggatttacgtgcaaccaataccacttcactgaccaggataccggcgttggcgatcaacgaacggcccggctccaggatgatttccggcaggtcgtcgccgaagtcttccttgaggaagcggatgatttcttcggcgtaggtttccaggctgttggtgcgggtgatgtagttggccgggaagccgccgcccatgttgatcagcttcaggtgaataccgtcttcttctttcaggcgttcgaagatcactttgaccttggcgatcgccgcgtcccacacgctgatgtcgcgctgctgcgagcccacgtggaacgagatgccgtatggcaccaggcccaggtcacgggcgaggatcagcaggtccatggccatgtcggtctggcagccgaatttgcgcgacagcggccagtcagccgtggtcgagccttcggtgaggatacgtacatacactttagaacccggagcggccttggcgatgttgcgcaggtcggcttcggagtcggtggagaacaggcgtacgcctttctcgtagaagtagcggatgtccttggacttcttgatggtgttgccgtagctgatacggtcagggctgacgccacggcccagtaccttgtccagctcgtagatcgaggcgatgtcgaagctcgaacctttgtctttgagcaggtcgatgatctcgacggccgggttggccttgacggcgtaatagaccttggcgaattcgaaaccggcgcgcaggtcatcgtaggcctggctgatcatcgcggtgtcgatcaccacgaacggggtttcttgcttgtcggcgaacgccttcattttgtcaaaagtggcgcgcgcgaaataatcttcgacgttgatcgacatgctgggaactcctaagggcaaactgtagtaatcaatgggtgcaactgaacgtcctccgtatccccactttggttcgcctacttcccaaggcatgtcgccgaaagcaaaaaggccatgggatcaaccgcttcccttggccttgctgtctcgtcgtcagtacttgagccggatggatcgtttccagcatggacgttcggcgcgaactttaggacgtgaggggccatagatcaactaaaaatgtcgcgtttttgcacgcgctcgtcgcacagccgcgtgcagctacttatgtaaccgaccggtgtgacggaatgatgttccccggatagggcaaattggcgggattttgctgacacaacagagggcaaatgtgggagggggcttgcccccgatgtcggagtgtcagccatacataggctgactgacaccctgctatcgggggcaagccccctcccacatttttaaccgagcagcgtcacatcaagccaacgcggtttcagccggcgagacgatactggtcttgccgccacgggacttaccggagcttaagtactcggcaatcgactcctgggtcacttcacccaggaatacccgctccgcatccatcaccggcagccacgagcggttgaactcgtacatgcgcgacagcaggatgcgcaagtgctcgtcatatgcggccgtggcgttaaactcgcgcaggtactggccgcaggtaccggtctgacggtgcaggtcgcgacggcgtacataacccagcgccttgttctcggcacaggtgacgaccacatagcggcggtcggtttcgtccattagctccagggcatcggccaccggcgtttccgggctcaccgacggcgcgttgtccgccgcgtcttcggccttcaccagcagcagacgcttgagggtgctgtcctggcccacgaagttgctgacgaactcgtcggccgggtgtgccagcagcgtgtccgggtggtcgatctgcagcagcttgccggcgcggaagatggcgatcttgtcacccagcttgatggcctcgtcgatgtcgtggctgaccatgatcacggtcttgttcagcgcgcgctgcatctcgaagaactcgttctggatcatctcgcggttgatcgggtcgaccgcgccgaacggttcgtccatcagcagcagcggcgcatcggccgccagtgcacggatcacgccgatacgctgttgctggccacccgacagctcacgcggatagcgatgcaggtactgcttgggctccagcttgatcatgctcatcaactcgcgggcgcggtcgtggcatttctgcttgtcccagccgagcagcttgggcaccaccacgatgttttcctcgatggtcatgttggggaacagtccgatctgctggatcacatagccgatgttgcgacgcagtgtcacttcgtcgaggtcggtggtgtcttcgccgttgatcaggatcttgcccgaggtaggcttgatcaggcggttgatcattttcagcgtggtgcttttgccgcaacccgatgggccgaggaatacgcaaatctcaccttcgttgacggtcaggcttacatcgttcacggccgttacagtcttgccgttgctttggaaggtcttggacaggttttgaagttcgatcatttgagcaatccttttggagtcagcgagcgttgcagccattgcagaagcaggtcggcgaagatggccaggagactgaccagcacggcgccaacgatcagcatcgacatgtcgctgcggctgatggaagccagaataagtacacccaggccaccggcgccgatggtggcggcgatggtcatcacaccaatgttcatcaccacggctgtgcgcacaccggcgaggattaccggcacggcgatgggcaactcgaccatgcgcaggcgctggccgaaggtcatgccgatgcctttggcggcttcgcgaatgcccggctccacgccagtgagggcgaggtaggtgttacgcatgatcggcaacagggagtagaggaacacggcggtgatcgccggcatcggccccaggccctggccgaatttggagtagaacggcagcaacaggccgaacagcgcgatggacggcacggtcagcaacaccgtggcgctggcctgcaatgggccggcgagggtcgggaaacgcgtcatcagaatgcccaggggcacgccgatcaggatcgcgaggatcacggcgataccgaccagggtgatgtgctgcccggtcaggtgcaggacttgggcccaatcaagatgggaaaaggcgttcaggaattccatgtcttctcctcttattgattgatgggatgctggcgcaggaaatcggcggcaacagcggaagggctttcatggtcgacgtcgacccgcgcattcagctggcgcatggtttcgtcgtcgaacaggtcagccaacggtttgagttcagctgcgagcgttgggtgctggtcgaggtattcctggcggatcaccggtgcggcggtgtagtccgggaagtagtgcttgtcgtcttccagcagcttgagcttgaaggcgttcaggcggccgtcggtggtgtagaccaggccggcaaatacctggccgttacgcagcgcggtatagaccaggccggcgtccatctgtcgggtgtttttacgcgtgaggttcatgtcgtacagcttgaccatgccggccaggccgtcggagcggttggcgaactctgtatccagggcgaccaggcggttgctcttggcgtcttgcgccacggccttggtcaggtcgctgatcgtgctgatctcgggatgctcagcggcaactttctctggcagcgccagggcgtaggtgttgctgaagcgcgacggggagagccagaccaggccctttttcgcgtcgagttctttcacccgtgcgtaggactgttcgctgtcgagcttctcgtcgacatggttgtaggccaccagcgacacgccggtgtactcccagatcaggtccagttgcccgctttcctgggcgctgcgcgccaggttgctacccaatccgccggtcacgcgggtgtcatagcccttggtgcgcaggtactgggaagtgatttcggcgagcagggtctgttcggtgaacacccgggcgccgatgcggattaccggtttttcggcggcttgcgcaatgcctgcaaagagcaggacgcagctcactatcaatgtcagttttttcatgtcggttccttaagacgcacgcaacccgcgttccagccagaggcggctggccagggtcaccagaccgtcaagcagcaaagccagcagcgcggtgcacgcggcgccgagcagcaattgcggctgattgttcagggcgatgccggggaagatcaggctgcccaggctgttggcaccgatcaggaacgccagcggcgcggtgccgacattgatcgccagggccacacgcacaccgccaatgatgattggcacggcgttgggcaattccacgcgaaacagcacttggcgcggcgtcatgccgatgccggtggcggcttctttcagggagccctggacgtttttcaggccttcgtaggtgttgcgcacgataggcaggagggaggcgaggaacagcgcgaagatggccgggccgctgccgatgccaagaacgccgagggcgatggccagtacggccaggggcgggacggtgttgccgatgttgaagatctgcatgaagcgttctgcgcgcccgaccatgtgcggtcggctgagcaggataccggcggggatgcccacaacgagggcggccagcatggagacaagaacgaggatcaggtgtgcttgcaggtaaaacaacaaatcgtcgcggtacagttcgatcgtgttgatgccgatccagtggaccagcagggccaggagcgcgacgacaaccgcacctcctatcagccctttgccatagcgaatagccacaggcggactccttttttcttctgtcggcgcccacattctccggcggcaatgccattcctggctgcctctgaatgtggtcgcgaaatgcagctcgtcgataccggcaacgcggtaaaaatccgagccatgagcgcagcctcgtcaggctaacttgctgatttatcagcccctgttccgagtgcgatagcaggggagtggacgtctcgaccttttaaaaggttccatacttggcagcatttagccacccctaatcgggtgaacggtggtccggcacctggggtttgcgctatactcgccgcccttttttgactcacctgccaggcgatttcccatgacccaccaggccgccgaagtcgcgaaacgccgcactttcgccattatttcccaccccgatgccggtaaaaccaccatcacagagaagctcttgctgatgggcaaggcaatcgcagtggccggcacggtgaaatcccgcaaatccgaccgccatgccacctccgactggatggaaatggaaaaacaacggggtatctcgattaccacgtcggtcatgcagttcccgtatcgcgaccacatggtcaacctgctcgacaccccgggccacgaagacttctctgaagacacctaccgcaccctgaccgcggtggactcggcgttgatggtcctcgacggcggtaaaggtgtcgagccacgtaccatcgcgctgatggacgtgtgccgtctgcgtgacacgcccatcgtcagcttcatcaacaaactcgatcgcgatatccgcgaccccatcgagctgctggatgaaatcgaagccgtcctgaagatcaaggccgcgccgatcacctggccgatcggttgctaccgcgacttcaagggcgtgtaccacctggccgacgactacatcattgtctacaccgccggccacggtcacgagcgcaccgaaaccaagatcatcgagaagctcgactccgacgaagcccgcgcccacctgggtgatgagtacgaccgttttgtcgaccagctggaactggtgcagggcgcctgccacgagttcaaccagcaggaattcctcgacggccaactgactccggtgttcttcgggaccgccctgggcaacttcggtgtcgaccacgtactcgacgcggtcgtcgactgggcgccgcgcccactggcacgggtggccaacgagcgcaccgtggaaccggtggaagagaagttctcgggcttcgtgttcaagatccaggcgaacatggaccccaagcaccgcgaccgtatcgccttcatgcgcatctgctccggcaaatacgaaaaaggcatgaagatgcgccacgtgcgcaccggcaaggacgtgcgcatcggcgacgccctgacgttcttctcctccgagcgtgaacagctggaagaggcgtttgccggcgacatcatcggcctgcacaaccatggcaccatccagatcggcgacaccttcaccgaaggcgaaaccctgggcttcaccggcatcccgcacttcgccccggaactgttccgccgtgtacgcctgcgcgacccgctcaaatccaagcaactgcgccagggcctgcaacaactcgcggaagagggcgccacccaggtgttcttccccgagcgcagcaacgacatcatcctcggcgccgtcggtgtgctgcagttcgatgtggtcgccagccgcctgaaagaggaatacaaggtggagtgctcgtatgagccaatcaccgtgtactccgcgcgctggatcgattgcagcgataagaagaagttggaagagttttccaacaaggccgtggaaaacctcgcggtggacggtggcggtcacctgacctacctcgcgcctacccgagtgaacctggcgttgatggaagagcgctggccggacgtgaaattccgcgcgacccgcgaacaccattaaggtctgagcggtaaatagaagggtgaagctgtgatggcttcaccctttttattggccaaacacaaattaaaatgtgggagggggcaagtcgaatcgtcgcaccgcccctcccacattttgatcttcatcgatcagggccattggcgagaaacccacatcccgtctagcgtttcaggtatttcacttacccatcgacggaataggaggccaccgtgcgtataactcaacgcgccattcaactggtgctgctgggggctctggggttgtccgcctcattggcgcttgcaggcgccggagcgccccaatggaagggcacgggccctgtcaccaagaagaagcagcaggaggtcaactccggaagttggcaaccccaggcgcagcctgcgcccaaggaggatgcggaaaacccctataacgaaggggaagacagcgaaacctatgatgacggtgacacctgatagctggcgcaaaccctctatcacaactagcttcaaggactggcgacggtaaatcgctgtcgtacggattcatctactgactggacggaaatcgaccatgactatctttcaacgtgtagtgctgttgctgaaagtgttggtgatgctatccctgggcatctcgtccgcatgggccaatgcggctgtgcagagccaggcgccgggctttgtggcggcgaagacggtgcaggccggtggtttgcaactggccaagagcgagtcggaacccggtgacgaagatcagggcggctcaaaggatgatgacgaccagcaagcgccgccagatgacgatgacactgaaggtgacagcgacacctgatacgtctgggcccccctgcctgtaatgcccgcgatcgttcccgcgctctgcgtgggaacgcattctttgacgctccccattacctttgattgctgagccgatctgtcaggtttgacagtagacggccggcgctcgcctccttatttttcaggtgtctttatccaggggcctttcaatgcctgaaacaggagagcaccatgaaaaacaaagcgacgggacggtttaaatggaaagtgggagctcaggcccttgaatcgaccgatctggattttgtggctgatgaccaaagcgaggatttcgtggttcaagcccgttccactgcaagcgacggtgtagatgtagagctgacgctttatattccagaacgagacccgcaaagtaaaaaatacacctacggttcccatgacgagtatcaagcctcggttcattacactgtcggcggtcgacctaatagttgggagggcggctacgtggttcgggaagcggcggacttttcttccatcgatccgggcatttggcgcgtcaagctcatttttgggattgaggttgccctgaacggcggtgttatttcgataaagggcgagggcgaagtcaaaggggctgctccctggggtaaaaccctgcgcaagcgttttccatccaagcccaaaagaaagcccctcccaccaggctgatgcgcaacctgatgggaggggctgtagaacacatgcaatgccctgggcttagtcacccagggcatttttgttgcggtgtcacgccacaaattgctccgcgtaatggcaagccacctggcggttatccagcggccgcaactgcggctcctcggtgctgcaccgcgccgtcgcgtacgggcaacgcttgtggaacgcgcagcccggcggcgggttcagcgggttgggcagttcgccgacaatcttgatcttcggcttgttcgggtccgggtggatggtcggcgtggccgacagcagcgcctgggtgtacggatgcagcgggcgtgcgtagatgtcttccttggggcccacttccaccgggcggccgaggtacatcaccatcacgtcatcggcgacatgctgcaccaccgccaggttgtgggagatgaacacgtaggccgtgttgaattcctgctgcaggtccatgaacaggttgagcacctgggcctggatcgacacgtcgagtgccgaggtcggttcatccgccaccagcactttcggttgcagcatcatcgcgcgggccagggcgatgcgctggcgctgaccaccagagaacatgtgcgggtagcgctgataatgctcggggcgcaggcccacttgcttcatcatcgcctgcactttttcgcggcgttcggcggcggacaggttggtgttgatcaatagcggctcgccgagttgatcaccgaccttctggcgtgggttcaacgacgcgtacgggctctggaacaccatctgcacgtctttgcgcaattgcttgcgttgggccttgtcggcaccggcgacttcctggccggcgattttcagggagcccgaagacggctcttcaatcagcgtgagcgcacgggccagggtggatttgccgcaacccgactcgcccacaaccgcgagggtcttgccggcttccaattcaaaggacacgccattgagtgcgcgcaccagcgcgtggcccttgaacaggccgcgggacacttcgtagtgacgggtcaggtcgcgggcggtaagaacgacggccattacgccacctcctggttcaaggggtagaagcagcgcgcaaggctgttggttttcggatcaaggccgggacgctgggcgcggcagctgtcctgcacatacgggcagcgcggtgacagcaggcaaccctgcgggcggtcataacgacctggaacgatacccggcagcgtggccaggcgagtggcgccgaggctgtgctcggggatcgccttgagcagcgcttcgctgtacgggtgcgccggaatgtcgaacaactgcggcacctggccgacttccacggcttggccggcgtacatcacgcacacgcgctgggcggtttccgccacgacagcaaggtcgtgagtgatcagcaccaggcccatgttctgctctttctgcagggccagcagcagttccatgatctgcgcctggatggtcacgtccaacgccgtggtcggttcgtccgcgatcagcagtttcggctcgccggcaatcgccatggcgatggccacacgctggctcataccgccggacagttggtgcgggtaggcatccatacggctggcagcgcccgggatttcaaccttttccaacagttcgatggcacgcttgcgcgcttgcttgccggacattttcaggtgcaggcgcagcacttcttcgatctggaagcccacggtgtagctggggttcagcgcggtcatcgggtcctggaacaccatcgccaggtctttgccgacgatctggcggcgctggcggttgctcaacttgagcatgtccttgccgtcgaagttcagggcgtcggcggtgacgatgccggggtgctcgatgaggcccatcagcgccatcatggtcacggatttacccgagcccgactcgccaacgatggccagtacttcgcctttgtcgacggaaatgtcgaggccatcgaccaccggcacggcggtcttgtcgccgaagcgcacgttgagattcttgatttctaacagtgacatgggaatctcctcaggcggcgttcttgagtttcgggtccagcgcatcgcgcaggccgtcgcccatcaagttgattgccagcacgctgagcaaaatggtcaaacccggcaggctcaccacccaccaggcgcgttcgatgtagtcacgggccgaagccagcatggtgccccactctggggttggcggttgtacgccaaggccgaggaagccgagggccgcagcatcgaggatcgccgaagagaagctcaaggtggcctggacgatcagcggtgccatgcagttgggcagcacggtgatgaacatcaggcgcggcaagccggcgccggcgaggcgggcggcagtcacgtagtcgcggttcagttcgcccatcaccgcagcgcgggtcagacgcacgtaggacggcagcgacacgatcgcgatggcgatcacggtgttgatcaggccagggccgaggattgccacaatggcgacggccagcagcagcgacggcagggccagcatgatgtccatcagacgcatgatggtcgggccgagcaagcgcgggaagaacccggcgaacagacccagcaggatgcccgggatcagcgacatcaccaccgacgacaaaccgatcagcaacgacaggcgcgagccctggatcaggcgtgaaagcaggtcacggcccagttcgtcggtgccgagcaggaattgcatctgcccaccctccagccaggctggcggggtcagcaggaagtcgcggtattgctcgctggggttatgcggtgccacccacggagcgaagatcgcgcagaacacgatcagcaacatgaacagcaggccggcaactgcgcctttgttcttggagaaggcttgccagaattctttgtacggggacgggtacagcaggctttgatcgactgctgacactggagtaggtgtggtcatggtcatgatctcagcgctggtgacggatgcgtgggttggcgaagccgtagaggatatccaccacgaagttcaccaggatcaccaggcaggcgatcagcaggatgccgttctgcaccaccgggtagtcccgcgcgccaatggcttcgatcagccatttgccgatgccgggccacgagaagatggtttcggtcaggaccgcaccggccagcagggtgccgacttgcaggccgaccacggtcagtaccggaatcagcgcgttacgcaggccgtgcacgaacaccacgcgtgccggcgacaggcctttggccttggcggtacggatgtagtcttcgcgcagcacttcgagcatcgacgaacgggtcatccgcgcgatcaccgccagcgggatggtgccgagcacgatggccggcaggatcaggtggtgcagggcgtcgaagaacgcgtccggctcgtcagccagcagcgtgtcgatgagcatgaagccggtacgcggctcgatgtcgtaaagcaggtcgatacgcccggaaaccggggtccagcccaggctgaccgagaagaacatgatcaggatcaggccccaccagaagatcggcatcgagtatcccgccagggagatgcccatcaccccgtggtcgaacagggatcctcgcttcaatgccgcgatcaccccggccaacaggcccaggataccggcgaacaacagggcggccatggacagttccagggtcgcggggaagagggcggtgaattcagtccacacgctggtgcgggtccgcagcgattcgccaaggtcaccctgggcgagcttgccgacgtaatccaggtattgcgcatacagcggcttgttaaggccaaggcgttccattgcctgtgcgtgcatctcggggtcgacgcgccgctcgcccatcatgacttcgacggggtcgccagggatcatgcgtatcaacgcaaacgtgagcaacgtgatgccgaaaaacgtggggatcaataaccccagtcggcgggcaataaaactaaacatcttgtcgtgtacctcaatcagccggttaggcaggtccggcgccgtcaatgtcgacggcgccgagcgtttttcttatttacttcacctgggtggtggcgaagttattgttcgtcagagggctttgggtataaccctcgacgttcttgcgcatagcggtgaacattttcgggtaagccatggggatccatggttggtccttgtcgaaaacgtccatggcttgttcatagagtgcagcgcgttgtgcgggttcagccacagcgcgcgccttgtcgatcaagtcttgaaactctttgttacaccagcgcgcgtagttttcgccgtttttcgctgcatcgcaactcaggttcggcgtgaggaagttatccgggtcgccgttatcccccgcccatccggcggataccatgtcgtgttcaccgtttttagcacgcttgagcatttcgccccattccatgactttgatattcaccttcaagccaatctgcgccagatccgcctgcatgcgctgggcgccgagcatcgggttagggttggtcgggccgccgccgttacgggtgaacagggtgaactcggtgccttccggcacacccgcttccttgagcagggcacgggccttgtcgaggtcgcgcggtgggtttttcagcttgtcgttgaagcccagcagcgtggggggaaacgggccggtggcatcgacagcgttgcctttgccgtacagcgattcgttgtagccttttttgtcgaacgcgatgttgatcgcgtgacgcacccgtgcgtcgctcatgtacttgtgggtggtgttcagtgcggtgtaggcggtggtcatcgccgccagttcatcgaccttcaggttcgggtctttcttgatgctgggcaggtcatcgggcttgggatatagcgcgacctggcattcgttggccttgagcttctgcaggcgcacgttgttatcgaccgcaatggccaggatcaacggatcggccggcggcttgccacggaagtactccgggttggccttgaagcgcacctgggcatctttctggtagcggatgaagatgaacgggccggtaccgatcggcttgctattgagctcatcggtcttaccggcggcgagcagtttgtcggcgtattcagcggagtggatggcggtaaacggcatcgcgacatcggccaggaacggtgcttcagggcgcgtcagggtgaagaccaccgtgtggtcatcagtcttctcgacacttttgagcagttccttgaagcccatgctttcgaaataggggaaacccgtggtggatttgttatgccaagggtgtttcgggtccaactggcgctggaagctccagagcacgtcatcggcattcaagttacgcgtgggtttgaaatagtcggtggtgtggaacttgacgtcatcgcgcaggtggaacgtataggtcaggccgtcgtcactgatttcccagctcttggcgagcgcgggaacgatttcagtggtgcctggcttgaagtccaccaaacggttgaacatggtttcagcagcggcgtcagcagtcacggccgtggtgtacaggaccgggtcgaaaccttccgggctggcttcggtgcagaccaccagtggtttggccgaaacgccgatggccacgctcaacaatgcggcagccatggcggcttgtagtgggagcaatttcattcggagccctctgcaatcgatgggaccagacaagcgtagacggcgggctcgtcctgagcccgccgtctacctggtgctaattaaagaatgttgaacgggatggtggtgaccaggcggaattcgcgcaggttgccgtcagactggttttcgctggcgcggtgcgtcacgtaggtggcacgaacggtagtggctttcagaggaccgctctggatcgcataggaagaaccaatgccgtattcctggtggtgctcgccgttctgggcctgaatgccgttgtaggcgaagtctttcacaccgttgtcaccacggtagtgagtgccgtcgataccccagccgcgagccgagtagatgttgaacttcaggcctggcacgccatattcggccatgttgatgccgtaggcgacctggaaggacttctcgttcggaccgttgaagtcggaagtcagggagttggccaggtagatgccgttggtttcgtgcaggtagtcgaagtactcgttaccgttcacttcctggtacgagaaggtcaggctgtgagcctggtgagtcaggcccagcgacagcgagtaggtatcgttgtcgatcgtgcccatcaactttttgccttcgtcgacggttttgtagtagttcaggccggtggtcaggctcagtgcctggctgtcacccagctcatgggtagcgccgaagtagtactggttccagaagtctttcacgttggcggcgaacaggctggtcttcaggctcttgaatggctggtagttgacgccgagggtactgaccttatcggtctcctgcttgccattaccatactcactacggaatttcgacaggctctgctcagtccgcggggatacgcggtcaaagacgccgccctggaacgacaggttgctgaactcttcgctgttgaagctcacaccttcaaagctcgaaggcaatgcgcggttgccgatggtgtcgacgatgccactactgaagttctggcgaccggcggtcaacgtggtgttcgacacacggaacttgacgttggccagacccagtttgctccactggcctactgcgtcaccgaaggagtgagccagggtacggttggagccgccagcgatgtctttttggtcccggtcaagcgctatgtagttgtaagcggcgacttcggtactcacgccaactgtgccttgggtgaagcccgaggtgtagttgaggatcgtgccttgagcccagttgtaacgacgggaggtcgtggtcttgaccgtatcgccttcgtttttgaagtagctgaaacggtcgccacggaacttcatttcgttggagtaccagttacgggttgtaccgcccaggctttgaccgtcgataaagcccttggcctcgctttgcgcgctggtgccggccagtgtggtcggaacgaagtcctggctttgggtttcagcgtaggcggtggccgtgatgctgctgatggccagggccagaagcgctttgctgctcagtttcatggatgaagctcctttggttctctttttaatgccggtcttttttggtgatccggctattgggtgtgtaactcgttcaagccattgcaaacgtttggcgtaggaaaaatcccaacaaaaggccgcgcgtttgcagcaaggcgggggccgccctgcgcaatccggttattttcttatggggtgatactgacgcccgagaacacgttgcgaccgaaggggcttaccttgaacccttcgactttggcgcttaacggctggttgaccgtcgagtgggcgactggcgtgatcggcacctgctgcttgagcagttgctgcgcctgtttgtacagaatagtccgttgttcgcggtcggtgacgaccttggcttgcttgatcagcttgtcgtacgccgggtcacaccacatggagtagttgttcccgccgatggcatcgcagctgtaaagggtgcccagccagttgtccgggtcgccgttgtcgccggtccaaccgatcaggctcacatcgtgctcaccgttcttggtgcgcttgatgtattcgccccactcgtagctgacgatcttgaccttgaggccgatcttggcccagtcgctttgcagcatctcggccatcagcttggcgttggggttgtacggccgttgcaccggcatcgcccacagggtgatttcggtgccttccttcacgccggcggccttgagcagttccttggctttttccgggttgtaggcggcgtccttgatggtctcgtcgtaggaccattgcgtcggcggcatggcgttgaccgccagttgccccgcgccctggtacacggcgttcaggatgctcggtttgttcaccgccatgtccagcgcctggcgcacttcgagctggtcgaacggcttgtggcgcacgttgtaggcgatgtagcccagattgaaccccggcttggtcagcaattgcaggttcgggtcggccttgagggcgtcgacgtcagccggacgcggatgcagggtcacctggcattcgccggccttgagcttttgcacgcgcaccgaggcgtcggtgttgatggcgaaaatcagctggtcgagcttgaccttgctcgggtcccagtactgtttgttggccacatagcggatctgcgaatctttctggtaacgctggaacacgaaggggccagtgccaatcggcttctggttgatgtcgctgggcttgccggccttgagcagttgctcggcatattcggccgacaggatcgcggcgaagctcatggcgatgttctggatgaacgcggcgtcgaccgtgttcagggtgatcaccacggtgtgcgggtcggttttggcgaccttggcaatgttcttgttcaggctcatcccgttgaagtacggaaactcggtggggtaggccttgcgaaacggatggtcggggtcaagcatgcggttgaaggtgaacagcacgtcgtcggcgttgaagtcccgggtcggcttgaattccttgttgctgtggaatttcaccccttcacgcagatgaaaggtataggtcaggccgtctggcgaaatatcccacttggttgccaatgccggtacgacactcgtctcgcccttttcaaactcaaccagtcggttgtacagcggctcggccacatcgttatcggtggcggtggtgtactgcgcggtgtcgaagccggccgggctgccttccgagcagaacaccaggctctgcttgtcggcggcgtgacccatcgtggcggcagccagcaggctggtgccaaaaagtgcggatagaacggtggtatggcgcatgacgatcccgatccttgtttgtagttgtcatcagtgagcaatcaccccggcgttcagccagggagacatcactgatcccacgcgcagcaagtgcctttccgaattgggagcctctgctgtcctacgacgttatgggtcgcggacttcgcagtaaatgcgccaaatcggactgaccttgtaggcaatggagtcgcactgcgcagttcattgctgtaggaagcaacggtttcgagtgtggtccatgtcctacggccaaggcggatgcaataacggcgacgtttatgcaacgtcgccgccagtgatccttacttgccgcttacgctcacgccgtagaaggagttcaagccaaacgggctgatcttgaagtcctgcacggtgttgcgcatgggttgatacaccgtcgagtgcgcgataggtgtcatcgggactgcatctttgaggatatgttgcgcctgcttgtacagctcggtgcgtttggcgacgtccgacgttgccttggcttctttgacgatgccgtcgaatttcttgtcgcaccacttggagaagttgttgccggccagcgagtcgcagccgaacagcacgttcagccagttgtccgggtcaccattgtcgccgctccagccaatgatcatggcctggttctcgccgcctttggaacgcttgatgtactcgccccattcgtagctgacgatgttgaccttcaggccgatctgtttccagtcgttctgcagcatctcggccatcagtttggcgttcgggttgtacggacgttgaaccggcatggcccacagggtgatctcggtgccgtctttgacgccggcctgcttgagcaggtccttggccttggccacgtcgtacggtgcatccttgatggtggtgtcgtaggaccattgggttggtggcatggcgttgacggccagttggccggcgccctgatacacggagtcgatgatctgctgcttgttcaccgacatgtccagcgcttcacgtacgcgcaggtcggacagtgggttggcggcggtctggcccttgaggaccggcatcacgttgtaagcgatatagcccaggttgaaaccggcttgatgcggcagtttcaggtccttgtcatcgcccagcgccttgaggtcggccggacgtgggaacaaggtgatctggcattcatttttcttcagcttctggatacgcaccgacgggtcggtggtgatggcgaagatcaggttgtcgatcttcacgtcttcaggtttccagtagtccttgttgccggtgtaacggatgttcgagtctttctggtagctcttgaacacgaacgggccagtgccgattggcttctggttgatgtccgcggccttgccgtctttcaacagttgggcggcgtattcagccgactggatcgaagcgaagctcatcgccaggttctggatgaaggcggcgtccacggtgccaagggtgaacttgacagtatggtcatcgactttttcgatgttcttgatgttggtgtccatccccatgtccgtgaagtacgggaactcggtggggtaggccttacggaacggatcgtccttgttgatcatgcggttgaacgtgaacagcacgtcatcggcattgaaggtacgggtcggcttgaagtacgaggtggtatggaacttgacgccatcacgcaggtggaaggtgtaggtcaagccatccggggacacgtcccagctggtggccagcccaggaatcacagcggtgccgccgcgttcgaactgggtcaggcggttgaacatggtttcggccgaggcatcgaagtctgttccggtggtgtactggcctgggtcgaaaccggccgggctcccttcggagcagaacaccaggttagtcgccgcttgggcgaaaggagctgcggccataaggccagcgctaacaattaacggaatgactgcgtgtttaagcatgttggcctcatgatttgttgtcatttttggtggtgagggcgacctcgtgagtcggcctgcggatacttatgcaggcgccatacccattgcaagatgctgaaccgttgcgagggtgaaacagtggtacgaacgtacaggaatgtcgcaattatgaaagtttcgacatatttgcgcatatttcgagggttttttcggtgcattcatcgcaccaaaaaagcccaaccgaggcgtctggcgcactcggttggggcgttgctgttacttatctagactcacgccgtagaacggtgtcaggccaaacgggctgatcttgaagtccctcacttccttacgcaggggctggaaaaccgtcgagtttgcaataggcgttataggtacttgttccttaaggattttttgtgcctgttgataccactttatgcgctgttcgcggtcgttgctgaccttggcctgttgcaccagtttgtcgtaggtcgggttacaccatttggcgtagttgctgcccttcaccgcagcacaactgtagagcacgccgagccagttatccgggtcgccgttgtcgccggtccagccataaatcatcgcgtcatgctcgccgtttttggcgcgcttgatgtactcgccccattcgtagctgacgatattggccttgatcccgatcttttcccaatcctgctggatcatttgcgccgacatgcgcgcgttcgggttggaggcgcgttgcacggtcattgcccacaggttgatggtggtacctggtgcaacccctgcttcttttagtagcgccttggctttggtcggatcgtagggcgcgtccttgatggtggggtcataagaccactgcgctggaggcagcgcgttctgcgccaattgtccggcactctggtacaccgccttgataatcgccggcttgtcgatcgccatgtccagggcctggcgcaccttgagctgatccagcggcgggtgggtcacgttgtaggccaggaagcccaggttgaaaccagcctgctgcagcacgcgcaagttcgggtcctgtttcatcacttcgatatcggcagggcgcgggtagccgctgacctggcattcgccggccttgagcttctgcaagcgcgacgcggcatccggggtgatggcgaacaccaggttgtcgagcttcacatcctcgggcttccagtactgtttattggccacgtagcggatctgcgaatccttctggtagcgcttgaacacaaacggcccggtgcctacgggtttctggttgatctcttcggccttgccctgcttgagcagttgcgcggcgtactcggcggattgcaccgaggcaaagctcatggccaggttttgcacaaacgacgcatcgacgttgttcaggttgaagcgcacggtgtggtcgtcaagtttctcgacgctcttgatcgtggtgttcaagcccatgtcggtgaagtacggcgactcggaggggtaggccttgcggaacggactgtcggcatccagcaggcgattgaaggtgaacagcacgtcatccgcgttgaaatcgcgggtaggggtgaagaaatcggtggtgtggaacttgacgccatcgcgcagatggaaggtgtaggtcaggccgtctttggagatgtcccagcttgtcgccaggccaggttcgacttcggtgccgccacgcttgaactgcgtgaggcggttgaacacggtttcggccgaagcatcgaaatcggtgccgctggtgtactggctggggtcgaagccggcagggctggcttcggaacagtagaccagggtgctggctgcctgggccattggcatgaagccgagcaggcctgcggcgaggaggagcggttttaaggcaattctttccatggagacccctgaagtggcagttgatcactgtccgaacgaaaaacggcggttaccgaggttaccgccgttaagcatcttcaggtaggtggaaggctggtggtgctggtcacggcctcattgttgatcgatggttacggcgttttgaccgatacttccacgtgggttggcgcatttttgtcgatagtaaagcggctgcccgctgagctggagtggtgaatggtaaaggtgcgtctgattttgacgttgatgttgtccaggtatccctcttctacgtgtttgaggcgatagtcgccggtggccgatacacgggtaatgtttttcgacgggtcgtagtcgatgtgataggtcgagtcattattggagatcgatacgccctcggccaatacgccttccttcaattcgccagagggtgttcggtgcaggagaaaagattccatggcaggtcccattgaaccttggtgagccacttcggaaatacgggcgcgcagttctggatcgggaatgatttgttcaaactgtttgattttttcagcctgtattgcctgaccattgctccctgtactgcgtaaggtatgttcagtgattccgtcgggcgtggttgttctcaggttgtagtttccgcgattgatatcgagcacaaagtttttggagtagtcgttgtcaccttcccaatgcgtggctttttcttctggcagaagctcaaagtttggttcttccagcgtccaggaaacgttgagtttgtgcttgattgcaccgctttcttcgaagttgctcgtggacaagacatagtccgtgtttttgccgaaatcaaagtagttatcaaacgattcggtcccctgcatttttgagccgtcaagtgtcacgaactgatcggagaacttaggcggtatgcttgattcgtcactgggggctggcgatggcgtacgttgccatggccacttgcgtgcgcctcctgggccgatttcacgggcccattcgccgtccagcgtggaatgagcggtcatcaccggcttgcgtgttgcacgatcaatgatctgtacataatcgttgctcagtttgaaatcgcttttgatctcgtacacctgaggcgtgccggtagcatcggtatagcggataaaccattggtccgtgccatcgggggttttgatttgatagatcccttttgaattgcgggtcgcgccttcgatcagttgctcgccgtttggcactgcgtgctgactgatattggctgcctgagtcggcttgagtcgattgacggagggctcttcgacgatgggcgttgtcggtgtgtcggtgtctggcaccactggctctttgacggtgtcctctatgctctcgctgaccgtggtgacggccccttgctcgccttttattaatttgctcgcctcaccagcgacaacgggcaccgcattcaatacgccaaacacaatatggtccgcgccacctggcttgccatgcttgagttggtccgcgcctatcccggcttccaacgcaccggcagcggcataaaatacctccagtcccactgcgacctcgggcatgacgatagccagcggggtcatcatcaaggcgatctttgtggtggtttccaacacttcaaggatcgtggctttggtgacatctccatcggtggttatttcggtttcggcatcggcgtatgagcgctctttctgccgccgggtcatggttgtgaatgggtcatcggacagcggttcggtagtaatgaaccgttgtgggtcaaattcattgagacgttccagagggccggcatcgggtgcgtcttttttcgaccagccgccgagcccggccagcgtttgattgaccccgtcagagaaaaagcgattggcctggtcacgtaacggaaagtgcatcgacagggcttcacgcttgaccggatcagccgcctgttcagccagccagttcttcatctcggcctggctgttgaacgaatgaatcggcgaggagttgccggggatatacagcaacgtacggttgaaaggtttaccttcggcatcgacgcgtgttgtcttgtcggtgatgtaaagcaggtctgtcgacttgtagccattgatgctcagcaggccaacttccatgttgggatccttgatgatagcgggcgaaagatcatcaagtttgagcttctcccaggtcgtgctcagcggcaggccggcggcgcgcatggccaagtccgtatcactatcgctcaagctgtcgttttcaaattgacgcaaagcacctcccacgaaggatgctttactcatttgttcgtacttgcgctcatgcgcgggccagaactcattcaggaattgcgtatacggtttgctgaagtcggtgttccatacgatgctacgaaataccgcaggtgtttggggtagcaggtttgtacggtcgtatacctctggttggccgggctgcgcccccacgtatatgccttcgtaggtcttctgcgggtgtgcgatcgaaacaaccttatcaaccaccgcgggcaaagggagcgcgggcgcgaggcggtctagccaggtgtgcagggttgatcgcagcttttcgggcgacgtctggtgctcgtcttccttattagcgctctggatgttatgcagcgcggcctgcgtcagtgatattttatttaagactttgccattcttgggttttggttgcttggggtcatagttcaacgtcacgataaacgtgttatccggatcaatatccttgtcccagcgtttcttcaagtcggccttgataatctcagcggtactctggcttggagtcttgaacccttcggcggctttccagatgtacctttccacccctgggttatatggcaggcccggaatgagtgtttcgtgatggttgcgtcgtttggcgcttttctggcggggctcatgctcagcgccgggagcaggcggtgtggcaaggtttgccgagttgctgggtgactcgggcacagatgtcgaggcagggcttaggggcgtctttatcatttgatctcgctcttttgaagtgagcctccctggcagctatgtttcagagagatgcgtggcaaatgatcgtggggacgttccggccttacgttttgttcttttcacattgttgttacggcatacatgttttgaataaaactcttggatagtgcgttgctgcgatgaggtagggcgcgtttccagcgcactataaggaggaacggggaagtgatagcgttgtaacgcgaggtgagtgcggctttatatagatataattgcccccataaaaaaggcgcgtccattcaggacgcgccagatgccatagcatcaggtagcaagcatggctgttgattcaatggttacagccccttttgcccgttcagtgctttactgcagcacttcgatcacgccatcggcactcatgctgacctggctggtgccggcttccacttcgggcgtgggagccgaatcggccatcgcggctttcatcatcatcccgccacgggcgtaaggcatcgggtagccattggtgttgaagttcagattgacgatcttgtagcccttgccgcccagcgcatcggtggccagttgggcgcgagccttgaatgcggcgactgcatccttgagcagcgcatcttcgctggccttgcgcgtggtgtcagcgatggcgaagtccatgttttccattttcagggtattcagcagttcaccggtgagcttggacagcgcagggaagtccgcgctttccaggcgcagctcggcacgctcgcgccagccggtgatcttctggttcttgttgtcgtagatcgggtagctgttgcggctgccctggcgcagggttacgcctttgacttcgcgggcctggcccagcgccttgttcatggtggtggtgatttcggcggcgagcttggccgggtcgctgttctgggactcggtatacagcgtgacgatcatcttatcgcgggccacctcctggctgacctcggcgcgcagggaaatctggttgtagttcagcccttcggcggccacggccggaaggctggccagggtggcgaggccgagggtgataacagcggcactgcgagtgaaacgagacatgaaagctccttggggtggtcgtgttcggtatgactgtagacggtggcagcgggttcttcgggtttacacattacctacaagttgtggcgctgccgacgaacggtcatttgcccggtctgcggcaaagagccacacgtgccgtgccagcgggtcggcttcgtttatactcctgccgatccgcctgcagcgctcaccgggagagctcatgctcgccgccgtaaaactgacttccgccacccgccagaacctctggcgcctgacgttcatccgcacgctggtgctggccgcacaggctggctccgtcgggctcgcctattggttcgacctgctgccgctgccgtggctgcagctgggcgtgaccctcgggttctccattgtgctgtgtgtgttcaccgccatccggttgcgcaccacgtggccggtgaccgagctggaatatgccctgcaattggcttgcgacctgtttatccacagtgtgttgctgtatttctccggcggttccaccaatccgttcgtttcttattacctggtgcccttgaccatcgccgccgtgaccttgccgtggcggtattcggtggtgctgtcgggcatcgccctgaccctctacaccctgttgctggcgcgcttctatccgctgcaaaccttccccatcgcccgggaaaacctgcagatctacgggatgtggttgagtttcgcgctgtccgccgccgtcatcaccttcttcgccgcacgcatggccgaagaactgcgccgccaggaagagctgcgcgccattcgccgtgaagaaggcttgcgcgatcagcaactgctggctgtcgccacccaggccgctggcgccgcccatgaactgggtacgccgttggcgaccatgagcgtgctgctcaatgagatgacccaggaccatcacgacccggcgttgcaggaagacctcggcgtgctgcgcgagcaggtcaagcagtgcaagcagaccttgcagcaactggtacgcgccgccgaggccaatcgccgcctggcggtggagatgcaggatgtgacccagtggctcgacgaagccctgaaccgctggcacctgatgcgtcccgaagccagttaccgttttcatctattagggcagggcaccgtgccgcgcatggcgccgccgccggatctgacccaggccctgctcaacttgctgaacaatgccgccgatgcctgccccgaaggcctgggcgtgcagttggactgggatgccgaagacgtgaccatcagcattcgcgaccacggcgcgggcgtgccgctggccattgccgagcagatcggcaagccgttctttaccaccaagggcaaaggcttcggcctgggcctgtttttgagcaaggccagcgtgacccgcgcgggcggctcagtgaagctctatagtcatgaggaaggtggcacgctcaccgagctgcgcctgccccgtgtcgcacgaggagatatcgatgagtgacgagatccaagtcgaaggcgaagaactgccgcacctgctgctggtagatgacgacgccacctttacccgcgtgatggcgcgcgccatgagccggcgcggtttccgcgtcagcaccgctggatccgccgaagagggcctgaccatcgcccaggccgacctgccagactacgccgcgctcgacctgaagatggacggcgattctggcctggtgctgctgcccaagctgctggaactcgacccggaaatgcgcgtggtgatcctcaccggttattccagcattgccacggccgtcgaggcgatcaaacgcggtgcctgcaactacctgtgcaagccggcggacgccgacgatgtactggccgccttgctctccgagcacgccgacctcgacaccctggtgccggaaaacccgatgtcggtggaccgcttgcagtgggagcatatccagcgcgtgctgaccgagcacgaaggcaatatctccgccaccgcccgcgccctgggtatgcaccgccgtaccttgcagcgcaagttgcagaagcgtccggtacgtcgctgagcctgatctgaacaacagctgaacaatctgcttcaggccgcacggagcctcgaaccgatcaactatgatcggttcgaaagcctgtcatccttttccctaccgagcctggacaatgaatcagaacgctgagtattccgcggtcaatgacgcggtgcgtgggcaatttttacggcgggtgtgggggttgatcacgccttactggcgcagtgaagagaagggcatggcctggctgctgctgttggtggtgctggggctgtcgctgttcagtgtcgccgtgtcggtgtggttcaacagttggaaccgggatttctacaacgcgctggagcacaaggactacgacgcctttacccacctgctgatgtacttcagcgtgattgcggtggtggcgattgtgaccggcgtgttcacctcttatctgcaacagatgctcaccatccgctggcgccgctggctgacggaaagctactttgcccaatggctgggccacaagaattactaccacctggaatacggcggctacaccgataaccccgaccagcgtatctctgaagacctcaatgcctttaccgccagcaccctgaccctggggctgggctttatcagcaacctggtgagcctggtgtcgttctcggtgatcctgtggggcgtgtccggcagcatcgaagtgtggggcatcaccattcccggctacatgttttgggccgccctggtgtatgcggtgatcggtagctggttgacgcacttgattggtcgaaaactgatcggcttgagcaaccgtcaacaacgctttgaggctgacctgcgtttcagcctggtgcgggtgcgggagaacgcggaaagcatcgcgctgttcaacggtgagcccaacgagcgccagcagttaagcgcgcgtttcggacgggtatggagcaacttctggagcatcatgcagctcaagaagcgcctgaatttctttaccagcggttactcgcagatcgcgatcatctttccctttgtcgtcgcggccccgcgttactttgccggcaagatcgaactgggcgtgctgatgcaggtggcgcaggcgtttggcagtgtgcaaggcagcctcagttggtttgtcgacgcctacacgttgttggccagttggcgcgccacctgtgatcgtctgctgagtttcggccaagccatgcaagacaacgaaacccgcaccatgggcattggcctgcagcatcagggcgcggggttgcaggtcaaggacctgagcctggacctggccgacggtcgtcacctgctgcaaggcgccgacctgaccgttgccgagggcgagcgcctgatgctcagcggtcgctccggcagcggcaagtcgacgttgctgcgggcgatgggcaacctgtggcccaacggtcacggcaatatccgcctgccggccgagcgttatctgttcctgccgcagaaaccctatttgccgattggcacgctgaaggcggtgctgagttatccacaggacgacagcgtctacccggcggaacgttatgcacaggtcctggaaacctgccgcctgccccatctgatcgggcgactggacgaagcgaaccactggcagcgcatgctctcgccgggcgaacagcaacgcctggcgtttgcccgcgccttgttgtttgcaccgcaatggctgtacatggacgaagcgacgtcggccatggacgaagaggatgaggcaacgctgtatcaagcgttgatcgatcagttgccggggctgagcatcgtcagcgtcggtcatcgcagcagcctcaagcgcttccatgggcggcatgtgcggatcgagggggggcgtcttcaggaacaactactggcttgagtcctttaggtcgatgtgggagtggggcaagccccctcccacaacaaaaagcccggctgatcatcgatcagccgggctttttagtgcttgaagattaggttacttcttcaaaccgtaatgctcatccagcatgccaggggcgttcggcgtttttggcgcgtagtcccgtggtggctcctggttttcccgcggaggggtcaggcgctcccgtggggtttgcggtgcatcggaatgcaacgcggccagcaggcgctggcgggtgatgtcgtcgagggcgaggcggttggcgccatcggcgagatgatcctgtacttcctggtagctctgggtgagcttcttgaccagggtcgcggtgctgttgaagtgggtaacaacctcgttctgataactgtcaaaacgttcctggatatcatccagctgacgttgcgtgcggttaggcgcggcattcggcagcaagcgagcaaccaggaaaccaatggcgacaccggcaaccagggcaagagtcggcaacaaccaaactaagagcgagtgttccacgagtccttcctctataaacggctttgctttacgttaacggctcaaacctgcgctgtataccgcgattaagctcgcaatgatgccatgcacagacttttagctagacgagtcgaccctttgagaggtcacggagttcattccttgctcatgcgtgaaacccccgttttgatcgatggcccggtaggtcaattggaagccctgtacctggatcaccccgagccacgtggcctggcactgatctgtcaccctaacccggtgcagggcgggaccatgctcaataaagttgtatcgaccctgcaacgcaccgcccgcgatgccggtttgatcaccttgcgtttcaattaccgtggcgtcggcgcgagtgccggcacccacgacatgagcaccggtgaagtggacgatgccgaagcggctgccacctggctgcgggaaaaacaccccgacctgccgatcaccttgctcgggttttccttcggtggctacgtggccgccagcctgggtgggcgcctggaggccaagggcgaaaagctctcgcacctgttcatggtcgctgcggcggtgatgcgccttcgcgataccgatgcgttgccacaaggctgcccattgaccctgatccagccggaaaccgacgaagtggtcgacccgcagaccgtctacgactggtccgccgccttgaatcgcccccatgagctgctgaaagtggcagaatgcggacacttttttcacggcaagctcaccgatctgaaggatctggtgctgccgcgactctcgaattgatagcagtctgataagcgattacccatgacgactcgtacccgtatcctcaccggcatcaccaccaccggcacgccgcacctgggcaactacgccggtgcgatccgcccggcgatcctcgccagccaggacgccaatgccgactccttctacttcctggccgactaccacgccctgatcaaatgcgatgacccgcagcgcatccagcgctcgcgcatggaaatcgccgcgacctggctggccggtggcctggatgtgaaccgggtgacgttctatcgccagtcggacatcccggaaatccccgagctgacctggctgctcacctgcgtggccgccaagggcctgctcaaccgcgcccacgcgtacaaggcctcggtggacaagaacgtggaagccggcgaagacccggatgcgggcatcagcatgggcctgtacagctacccggtgctgatggcggcggacatcctgatgttcaatgcgcacaaggtgccggtggggcgcgaccagatccagcacgtggaaatggcccgcgacatcggccagcgtttcaaccacctgttcggcaacggtaaagaattcttcaccatgcccgaggcgttgatcgaagaaagcgtcgccaccttgccgggcctggatggccgcaagatgtcgaaaagctacgacaacaccatcccgttgttcaccagcgccaaggacatgaaggacgccatctcgcggatcgttaccgactcccgcgccccgggcgaagccaaggacccggacaattcgcacctgttcaccctgtaccaggcgtttgcgaccaaggcgcaggaagaagaattccgtgccgaattgctgcaaggcctgggttggggcgaggcgaagaaccgtctgttccaactgctcgacggccagttgggtgaagcccgcgagcgctaccatcaactgatgtcgcgcccatcggacatggaagacctgctgctggtcggcgccaacaaggcccgtgccgtggcggcgccgttcctggccgagctgcgtgaggcggtgggcctgcgttcgttcgtcaaccaggctgcggcgcccgtggcgaccaagaagaaagctgcgaaggccgcacgcttcgtcagttttcgcgaagacgatggcagcttccgctttcgtctgctggccgctgatggcgagcaactgctgctgtcgcgcaacttcgctgacggtaaagcggccggcgcggtgaccaagcaattgcaaagcggcgacgcgctggacctgcgcaccgaggccctgggcttcagcgtatggctggacggtgccgccgtggccgatagcgccgcgttcgccgacgaagcgtcgcgcgatgctgccatcgccgccttgcgcgttgcgttgacccccctcgaggattaacccgaccaagggttgattgccattatccagggccgtcgttacagtgacggcccgtttttgttgccttgctaacgaaattatgacgcccctagaacgatatcaagctgatctgaaacgccctgaattcttccatgacgcggcccaggaaacggcggtgcgtcatttgcagcgcctgtacgacgacctgctcgcggcctcgcaaagcaagccagggatgttcagcaagctgtttggcaagaaagaccacacgccggtcaagggcctgtacttctggggtggcgtgggtcggggcaagacctacctagtggacacttttttcgaagcgctgccgttcaaggaaaaggtacgtacgcacttccaccgcttcatgaagcgcgtgcacgaagagatgaagaccctgccgggcgagaaaaacccgctgaccatcatcgccaagcgtttctctgaagaggcgcgggtgatctgcttcgatgagttcttcgtgtccgacatcaccgacgccatgatcctcggcaccctgatggaagaactgttcaagaacggtgtgaccctggtcgccacttcgaacatcgtgcccgacggtttgtacaaggacggcctgcaacgcgcgcgcttcctgccggccatcgcgctgatcaaacagcacactgaaatcgttaacgtcgacagcggcgtcgactaccgcctgcgtcacttggagcaagcggagctgttccatttcccgctcaatgaggcggcccacgacagcctgaaaaagagcttccgcgccctcacgccggaatgcacccaggcggtggaaaacgacaagctgatgatcgagaaccgcgaaatcatcgcgctgcgtacctgcgatgacgtggcctggttcgagttccgccaactgtgcgacggcccgcgcagccagaacgactacatcgaactgggcaagatctttcacgcagtgattttgagcggtgtggaacagatgagcgtcaccaccgacgacatcgcgcgccgtttcatcaacatggtcgacgaattctacgaccgtaacgtgaagttgatcatctcggcggaagtcgagctcaaggacctgtacaccggtgggcgcttgaactttgagttccaacgcacgttgagccgcttgctggagatgcagtcccacgaattcctgtcgcgcggccacaaaccctaagatcgatgtagatcaaactgtgggagggggcttgccccctcccacatttgccttgtgtacgctctgactcaggcagcctgctggaattgctggcggtactggtttggcgatagctcggtgtgttgcctgaacaaccgcgcaaagaaactcgcatcgtcgtaacccacctcataactgatggtcttgatgctcttgcggctgcccgagagcaggcctttggccgtctcgatccgcaggcgttgcaggtaatgcagcggcttgtcgccggtggcggtctggaagcggcgcatgaagttgcggatgctcatgccgtgttcccgggcgacgtcttcgaagcggaacttgtcggcgaaatgctcttcgagccagtgctggatctgcaggatgatcacgtcctggtgcagcttctgaccaccaaacccgatacgtcccggcgagtagctgcgctgcacctcgtagagaatgtcgcgggccacggcctgggcgatgttggcgccgcagaagcgttcgatcaggtagatgtagaggtcgcacgccgaggtagtgccgccggcgcaatacaagttgtcggcgtcggtgaggtgcttgtcctggttgagctggaccttggggaagcgttcgctgaaggcattgaagaagcgccagtaggtggtcgcttccttgccatcgagcaggccggcttcggccagccagaacaccccggtggcttcgccgcagagcaccgcaccgcgtgcatgctgttcgcgcagccacggcagcacttgcgggtagcgggtgcacaaggtgtcgaagtcatcccagaaggccggcagcacaatgatgtcggcgtcttccaggccgccgtctaccggcatgatcacatcactgaaactgcacaccgattgtccatcggggctgaccaggcgtgtttcaaacccgggcgtcaggcccaggccttgttgcttgccgtaacgcaggctggcgaggtggaagaaatccttggcttgcatgagggtggaagcgaatacccgatcaatggccaaaatgctgacgcgccgcaagggcgtggagatttggttagacataatttcatttattcttataggggaaagtggtcaccagacggctggatcgtcttattttttgtcgcatgtgtccagtgtcccgtgctgctttcgcggcatagtctctgtgggctcgctcttgtccgacaatccacgcaggtgacccatgattcccagaaccttgttcagcccggaacacgaactcttccgcgagagcgtgcgcaccttcctcgaaaaggacgccgcgcctttccatgggcaatgggagaaacagggctatatcgaccgcaatttgtggagcagggcgggggaggcgggcatgttgtgttctcacctgccggaggaatatggcgggctgggtgcggactttctatacagcgcggtggtgatcgaagagatcagccggctgggcctgaccggtatcggcttttccctgcattcggacattgttgcgccgtacatcctgcattacggcagtgaagcgctgaaacacaaatacctgcccaagttgatctccggcgagatggtcacggcgattgccatgaccgagccgggggcgggttccgacctgcaaggtgtgaagaccactgcggtgctggacggcgacgagtatgtgatcaacggttcgaagacgttcatcaccaacggctacttggccgagttggtcatcgtggtcgccaagaccgatcccaaggccggcgccaagggtaccagcctgttcctggtggaggccgacacgccggggtttgccaagggcaagcgcctggagaaggtgggcatgaaggcccaggacacctcggagctgttcttccaggatgtgcgggtgcccaaggaaaacctgctgggccaggccggcatgggcttcgcctacctgatgcaggagctgcctcaggaacggttgaccgtggcgattggcgctttgtcgtcagctgaggcggcgcttgagtggaccctggattacacccgcgagcgccaggcgtttggcaaagcgattgcggatttccagaacactcgcttcaagttggccgagatggctaccgagattcagatcggccgggtatttgtcgacaagtgcatggcgttgcacctggaaggcaagctggatgtgcccacggcggcaatggccaagtactgggccaccgacctgcaatgcaaggtgctcgatgagtgcgtgcagttgcatggcggctacggcttcatgtgggaatacccgattgcccgggcctgggcggatgcgcgggtgcagcggatttatgcggggaccaatgagatcatgaaggagatcattgcgcgggcgctttgattgggcggttctgctgatggccaaatcgggggcaagccccctcccacacttgaatgtattcacagatcaaaatgtgggagggggcttgcccc

SEQ ID NO: 66 - DNA, 389282 bp, Pseudomonas nodulensis
  misc_feature (9508)..(9508): n is a, c, g, or t
  misc_feature (358269)..(358293): n is a, c, g, or t
caggtaccaccaacccgttcccgtggatgagcgaaatcatggacttgaagaaagagaaaaacttcttcgagacccgtgtgatcgagtaccagactggcggcgcgctgagctgggattgactccacatgtgggagggggcttgcccccgatgacattcgttcagctcaagcttcagtgactgatgcaccgcaatcgggggcaagccccctcccacatgggttgcggtgcgcgataaatctttgcaaattgcctcttatgcccaatcaaaccatcaagaccccttgcgtcggcctgtgctccaccgtctacggagacctggtctgccggggctgcaagcgctatcaccacgaagtgatccagtggaacggctacaacgccgaagaaaaacaggcggtgtggttgcgcctggagcaactgctggtgcaggtgatggccagcaagctggaagtgttcgacgcgcacctgctgcgccagcaactggaaaatcgcaagatccgctttatgccgcaccaatcgccatattgctgggcgtaccagctgattgcccgtggcgcgcgggtgatttccaggctggaggcgtatgggttggtgttgctgccggagtttcgtgagcgcccgctggccgacctgcgggatgccatcgaccgcgagtttttcctgctgtccgaagcgcactacgagcgctatatcgccccaggtttcctcaaggaagcgtttgggccggccctgatagcgaccctctaaaaaccagcccgcacattttgatttgcgcctgtcaggagttccaggacgccgcacgctccgtctgtaagccgtacttctcaatcgccagctgacacatccgcgcatccaacgccgtcagtgccgccagcacgatgtgataccgatccacctcaaagaaatcgcgcaacgccgcccgcgtatcactgcgcccgaacccatcagtaccaagcacggtgtagctggaatccagatacgaaccgatcatctgcggcacggcccgcacgtagtcggacacggccaccaccggcgcccccttgggcaagcattcagccaagtggctgacacgtgccgtctgctgcggatgcaagcgattccagcgttccagctcccgcgcttcccgcgccagttcgctgaaactggtcacgctgaacacctcgctcgccacctgccaatcctccgccagcaactgcgccgccgcttgcgcctcgcgcaccagcgtgccggaacccaacaggcgtaccttggcgtcggccgtaccttgcaagcaatacatgcccttgatgatcgccgcctccacgccttccggcaggctcggctgcgggtagttttcgttcatcagggtcacgtagtagaactcgtccacatcgtgctccagcatctggcgcatgccgtggtcgaggatcaccgcgaattcaccggcaaacgccgggtcgtaggcacggcagttgggcacggtggcagcggtgaggtggctgctgccgtcctggtgctgcaagccttcgccaccgagggtggtgcgcccggccgtggcgccgagcaggaagccacgggcacgctggtcggcagcggcccagatcaggtcgccgacgcgctggaagccaaacatcgagtaatagatgtagaacggcaacatgcgcaggccgtggactgaataactggtggccgccgcaacccaggagctgatggcgctggcttcgctgatgccctcctccagaatctgcccatcggtggcttcgcggtagctgaggatcgagccgatgtcttccggctcgtagcgctggcccacgctggaataaatgccgatctgcttgaacaggttagccatgccgaaggtgcgcgcttcgtccgcgacaatgggcacaatgcgtgggcccagggctttgtccttgagcaggttggtgagcatgcgcacaaaggccatggtggtggacatttccttgccgtcggcggccgtggcgaaaccggcgtagcccgctactgccggcacggtaacgggcccggcgacctggcgtcgactgggcacgtaaccgcccaatgcggtgcgccgctggtgcaggtagcgcagctcaacgctgtcgtctgccggtttgaaaaagctcagggattcggtctgttcatcgctcagcggcaattggaagcggttgcggaaggcgatcaacgcatcgcgatccagcttcttctgctggtgcgtggtcatcttgccctgcccggcctcacccatgccgaagccctttttggtctgggccaggatcaccgtgggcttgcccttgacccgccgcgccgcgtggtaggccgcgtgaatcttgaccatgtcatggccgccacgcttgagacggtcgatctgttcatcgctcaggccctcgaccagccgggccagggagtcactctggccgaagaagtgctcgcggttgtaggcgccgtccttggcggcgaaggtctggaattggccgtcaaccgtattggacaaaatgttgaccaacgaaccatcggcatccttggccagcaacgcatcccagtccgagccccagaccagtttgatcacgttccagccggcgccggcaaacaaggcctccagttcatcgatgatgcgcccgttgccgcgcaccgggccgtcgaggcgttgcaggttacaattgaccacccacgtgaggttgtccaggccttcgcgggcggccagggtcagggcggacatgctttccggctcgtccatctcgccgtcgccaaacacgccccagacatggcggtcggtggtgtcctgcaagccgcgatgttgcaagtaacgcatgaagcgcgcctggaaaatcgaactgatggggccgatccccatggaaccggtggggaactgccagaagtccggcatcagccaggggtggggatagctggacaggccacgtgcgccacccttgggcccgccgatctcctggcgatagtgggccaggtcggcttcactcaagcggccttcaaggaatgcccgtgcataaatgccgggcgcggaatgcggctggtagaacaccaggtcaccgccaaagccgtcgctgcgggcacggaagaaatggttgaaacccacctcgaacaagtctgccgcgctggcgtaactcgcgatatgcccgccgagttcgccataggcctggttggcgcgcaccaccatggccagggcgttccagcgcaccagtgaagccaggcgttcttcggtagcgagatcgccagggaacgccggctgctgctcgacgctgatgctattgatgtagggcgtgccatggcgcggtttccagtcgatgtgcggggcactggcatcctgggccagcaggtcgagaatttgccgtgcccgtgcggcgccggcgttggccactagtgaggccagggcgtcgcgccattcatccagctcttgctggtcaatcagcgctttcgtgaaaccgttcatgggcacctccgggctttttttccagtttatgtcggcgccggaggatgttttgcctgttatcaggcgctgttttcagcattttgagcatgaatcactgcgccatggctttttcgcagcacgttgtgctcaagccacccacgaccctgcaactgtgtttaaaatgccgcccgctcaatgactgacgtttaacgatgaacccagacgcactcgccaccctgcacgctcatttgctcgccgccctgcaaacgccaccgagcgaaacccgccgcctgttccatggccgtggtcgctgctggccgggcctggagcaactgacggtggactggctgcaaggcgtgctgctggtgtcgttgttcaaggagcccgacgctgcgcaactggacgccttgaaacagctgctgcacagccagttcggccgttataccgttgccctgcaacaccgctacctgccgcaaagcaccaccgaatggctggcgggcgagcccgtcgaagagcaaatcatcgtcgaaggcggcttgcgctacctgatcgacttgggcaagaaacagaatagcgggctgtttctcgacatgcgctacggccgtaattgggtgcgcgaacaggccaggggcatgcgtgtgctcaacctgtttgcctacacctgcgggttttccgtggcggccatcgaaggcggcgccgagcatgtggtgaacctggacatggcccgcggcgccttgagccgtggccgcgacaaccatcgtctcaacggtcatgacctgagcaaggtgagtttcctgggccatgacctgttcaagtcctgggccaaagtgaccaacagcggcccctacgacctggtgatcatcgacccgccctcgttccagaaaggcagcttcctgctgaccaaggactaccaacgcgtgctgcgccgcctgccggatttgctcacgccgcagggcacggtgctggcgtgcatgaacgacccggccttcggcgaagatttcctgatcgacggcgtcacccgcgaagcaccgggcctgcacttcgttgaacgcctggcaaacccaccggagtttcccgacatcgacccgcaaagtggcttgaaggccctggtgttccgccagggctgatgccgaaacgtcttacgcttgctacgctaagtgatacgccggggcggtgaaccttcttacccccttcccggtcgatacctgcattccccggccagactcgacggcgtcacgttgtcggctgccccgtttcaccttttggagaaccgcccgtgatatcgaccctgcatgtagccagactcaaagcctggggcgcccacggctttaccgccaccggcgtggtattggccttcctggccaccctggcgctgctggaaaactcgccgaaggcctgcctgctgtggctgggcctggcattggtggtggacggggtcgatggttcactggcgcgccgggtgaatgtcagcacggtattgccaagctttgacggctcggtgctggacctggtgatcgattacctcacctatgtgttcattcccgcgctgtttatctaccgctatatcgacctgccggacttcacccacctgtttacagtgtcggtgatcctggtgtcgtcgctgttctgcttctgcaacgtgaacatgaagagcaaggacaactacttcgtcggcttccccgccgcctggaacgtggtggcgctgtgcgtgtatatcatccagccggaagcctgggtcaccttgctcaccgtgatcggcctggccctgctgaccgtgacaccgatgaagttcctgcatccgttccgggtgaagcggttcatgccgatcaatatcgcggtgaccacgatctggttgctgtgcagcttcctgatggtggtggattacccgaacaccaacccgtggacgtttgggttgtggtcggtgatgtcggcgtatttcctcggaatttgtatctggcgtacggcgctggagtggatcgacacacatcgatcgtaagtcgacgcagtaacaatgtgggagggggcttgcccccgatagcggtgaatcagctacagatgagttagctggaacaccgcaatcgggggcaagccccctcccacatttggatttgctgagtccccgcgagtaagatggcggcctttcgcatagcgcccgccaagaataagccctgcccatgcccttcgaactcagcgtagacctcaccactctcgccatcctggcggtggttgccttcattgccggtttcatcgacgccatcgccggtggcggcggtctgctgaccacccccgccctgctcaccgccggcatgccaccgcatttggtactgggtaccaacaagctcagttccaccttcggctcggccaccgcgagttttaccttctatcgccgcaaactgttccacccgcgccaatgggtgcacgccatcgtcggcacgctgatcggcgcactgaccggcgccgtcgtcgctcactacctgccggccgagaccctgaacaagatgctgccggtgattgtgttcgcctgtggcgtgtacctgctgttcggcggcacacccaaggcgccgctggatgccgacgcgccgatcaagaagaaatggcaggccacccagggcttcggcctgggcttctacgatggcgttgccggtccgggcaccggagcgttctggacggtgagcacgatgctgctgcaccccatcgacctggtcaaagccagcggcgtggcgcgcagcatgaacttcgtcagcaacgcggcggcgctgacggtgttcatcatcaatggttcggtggactggatcgttggcctggccatgggcgtttcggtgatgtgcggcgcgttctttggcgcccgcagcgcaatcagcggtggcgccaaattcattcgcccggtgttcatcaccgtggtcctcggcctgaccgtgcgcctagcctggcagcactggttcagcgtggcctagacggcgggccaggtagaggtcgatcaggtaacgcgcaatcgaacgtgacgccggcaacggcggcaggtcgtggatgttgaaccactgcgcgtcctcgatctcatcggcctggggcacgatgtcgccaccggcgtactcggcatgaaagcccagcatcatcgaatgcgggaacggccagcactggctgcccatgtactggatgttcttgacctccacctgcacctcttcgcggacctcgcggatcaggcagtcttcggccgactcacccggctcggcaaaccccgccagggtgctgtagaccccgctgacaaaacgtggcgaacgcgccagcaggatctcgtcgccacgggtcaccagcacgatcatgctcggcgagatccgtgggtagctgcgcaggtcacaggcctggcagtgcatcgcgcgttcccgtggcacctggaccatggcctggccgcaactgccacagaaccggtgctcacgtgcccaggtgccgatctgcgccgcatagcccagcactttgtaaagggtgtgatcgccttgcagcatgaagccgcgcaggccctgccaactgcagcccggcacttcgcccgccgcatcgagttccagcaggtacaccggctcgccatcgaggtggccgataccgtgttcggcaaacaccgacaggtcctggcgcttgagccattcccggggaaacaacgggccgttggtgtcatgcaaaaagccgtcgcggctgcgggcgacggcccagccgccaggggtgtcgttgtccagcagcgttgtggtaatccagcctggggtcatgtcagtcaatccacgaattcgggtttctgcttgctcatatgggccgcgatggccacgcgcaggtcgttggattgcaacatagccgagttccaggtggcaacgtattccaagccgtcattgaccgtgtggtcacgcatgtagctgatcatggccttggtgccggtgagcgcaatcggcgatttggcggcgatttcatgggcaatctccatgacgccggccagcaggctgtcctgatcggcatagacgcgattgaccaggccgatactgcgcgcttcctcggcgccgaactggcgaccggtgtaggccagctcgcgcagcatgccgtcgccgatgatgcgcggcaggcgctgcagggtgccgacgtcggcggccatgccgatatcgatttccttgatcgagaattgcgcgccttcggcggcgtagcgcatgtcgcaggcgctgatcaggtcgatggcgccgccgatgcagtaaccctggatcgccgccagcaccggcttgcggcagttgtcgacggcgttgaacgaggcttgcagttcgagaatcttgcgccgcagcaggcgggcgttgcgaccgacatccttgccaaagtcattggcgaccgaggccagcatcatcaggtcgatgccagaggagaaatgcttgccggcgccgctgattaccacggcgcgcacggcgtcggtgtcttcgacccactggaagatgtcgatgatttcggtccagaacgcggcgttcatcgcgttgatcttttccgggcggttgatctgcacatgggcaacgttgccggtgagttcgacgacgaaagcttggtattcggacatggcagtgatccctgactggcgagtgataaggcccgaactataacaagtgtgtgtgacggcacatcggccaaaaacgggacgggcaaacgtaatggaatgttgtgggcgcaaggttcatgcagccccgatacatttcatcccggaggcccggcttatcggctatacaatcagggcccttgcctggagccgtctatgccgtccacgttgcgttcgtcgctgattcttgccctggtggtggtgttgaccggtattggcgcaggcctgggcggcatgctcctggccctgctgctgcacggtattcagcacctggcgtacggttacagcctcgacagcctggtcagccatgaaacctttttgtggggcgtgaccgccgccgcgccggagcgccgtttgcaggtgttggtagtgtgcggcctggtcgccgggttgggctggtggacgctctatcgctacgggcgcccgctggtgagcatcaagcaggcggtgtcggaacagatgccaatcatgccgcccaaaaccaccctcgcccacgcgcttttgcagatcatcaccgtggctctcggctcgccgctggggcgtgaagtggcgccccgtgaggttggtgcactggccgccacctggctgtcccaacgcgcccgactcgaaccgcccatgcaccgactgatcgtggcctgcggcgcgggtgccgggctggcggctgtgtacaacgtgccgttgggcggcgcggtgtttgtactggaagtgctggtgggcgcattcagttggccggcggcgctgattgcgctggcgacctcggcgattggtgcagcggtggcgtggatcgggctgggggcagaggcgcagtacgtggtgccgcattttgtgctgagcccggtgctgatcgcctgggccgtggtgtgtgggccggtattcggcgtggcggcctatgccttcacccggctgaccggcgcagcaagggcaaacgccgccagaggctggcgcctgccggtactggcgctgatcaacttcagcgttatcggcggcctggcgatgctgctgccgcaaatcctcggcaatggcaaaggccccgcgcaattgggtttcgacaatgaactgaccatcggcctggccgcactgttgctggtggtcaaagtgctgatcaccagcagcagcctgcgcgccggggccgaaggcggcctgctcacccccggcctggcgaatggcgcgttactggcgatcatcctcggcggcacctggagcctggtgtggcccggcgtgcccctcggtgcgtttgcaatcatcggcgcggcggcgttcctcgccgccagcatgagcatgccactgaccgcgattgtgctggtggcggaattcacccgcatagaccatgacttcctggtgccgatcatcctcgcggtggtcggcgcggtgtgcgtgagcaagctgtgccaacgcatggaaactgctggaaaaaagccggccatatctgactgacgccctcccattaagggtgaacacggcaattgtggcgagcgggcttgtcccgcgttgggcgngtctttaggtagaacaggcgataagtaccctgtggcgagcgggcttgtcccgcgttgggttgcgaagcgaccctggaaggaagaatgcggtgcgtcaggtactcttcggctgcgggtttcagggctgcttcgccgcccaacgcgggacaagcccgctcgccacagggtacttatcgcctgttctacctaaagaccttgaaagggctgggcccaagcgccatccttcgcgctttaagccgccccattcgcggcgctcgacgtttaaaggatatgcccatgcacgcccaacccctcaccgccgctgaattcgagttcatcgaagacactttgcttaaatacggcgacgaccattcggtgctgaacctggccgaactcgacggctacttcaccgcgctggtgtccagcccggtgcaggtggacgtggcggagtggttcccggcaatctggggcggccagaacccggaatgggacaacatggacgaagcgcaacgcttcctcgaactgtgcgtacgccatatcaacaccctggccgggcaactggccaccgacgccacaggcttcaaggcgcgcttcgacgaaaccgaacaccagggccacaccgtgaccctcgccgaagaatggtgctttggctacatccgtggcgccgccatcggtaactggccggaactgccagccgcacaggctgcgcagttggagaagatttcctggtgcgccgagcaggacaatttcgaactgccggccgacctggatgtacaggcgcaccagcagcgcgtcagtgaaatcgaaccggctgcgcgggcgctgcatgattattggttggcacagcgataggtgtatctgaaggaccgaagcgcctgcatcgccggcaagccggctcctacagggtccgcgtttgcattcgcctttgctttacaccactcaagccggctctcaggccgctgtgctctggcttttgattttgatcttaggcgccccgtcaaacacgctggccggaattcggcagggatttggggggtaaaccggcagggatgccggtttagccgccccgcgccatggatggcgcgtggtggcggccccccaaatcactgtcgaattacgggcacaccgagcctaggcgaggtgccgagtgttggggcaggagcgttttgcttacttttgcgctctatcaaaagtgagccgctgtaagagcggaaccaatagccgccgttaccaaagagacggatatgtacaccgtaaggccgccatcgccggcaagccagctcctacaattggaattgatgtacaccgcccagtaaatttcagcgtctgcgaccgcgcgctcgacaagcaccgccgctttggccgattattcgggtccgcccgccgaccttgccttgatcaggagccctgtaccttgagttcgcagaaaaccgtgaccgttacaccgcccaacttccccctcaatggcaaggtcgcgccccccggctccaaatccattaccaaccgtgccctgttgctggcggccctggccaagggcaccagccgtctcagcggcgcgctgaagagtgacgacacgcgccatatgtcggtagccctgcgccaaatgggcgtgaccatcgatgagccggacgacaccaccttcgtcgtcaccggccacggcaaactgcacctgccggtacaaccgctgttcctcggcaacgccggtaccgccatgcgttttctcaccgctgccgtggccacggtcgaaggcaccgtggtgttgaccggcgacgactacatgcaaaaacgcccgatcggcccgttgctggcgaccctcggccagaacggcatcctggtcgacagcccgaccggttgcccgccggtcaccgtgcacggcgtgggcaagatcaaggctaagcgcttcgagatcgacggcggcctgtccagccagtacgtgtcggccctgctgatgcttgcggcctgcggcgaagcgccgattgaagtggcgctgaccggcaaggacatcggtgcccgtggctatgtcgacctgaccctggactgcatgcgcgccttcggtgcccaggttgaagcggtcgacgacaccacctggcgcgtggccccgaccggctacaccgcccacgactatctgatcgaaccggacgcctccgccgccacttacctgtgggccgcgcaagtgttgactggaggccgcatcgacatcggcgtggcggcgcaggacttcacccagccggacgccaaggcccaggccgtgatcgcacagtttccgaacatgcaggccacagtggtcggctcgcagatgcaggacgcgatcccgaccctcgcagtgctcgcggcgttcaataacacgccggtgcgtttcaccgagctggccaacctgcgggtcaaggagtgcgaccgtgtgcaggcactgcatgacggcctcaacgaaatccgcccgggcttggcgaccatcgaaggcgatgacctgttggtagccagtgatcctgcgctggccggcacctcgtgcaccgcgctgatcgacacccacgccgaccaccgcattgccatgtgctttgccctggccgggctgaaggtttcgggtatccgcatccaggacccggactgcgtggccaagacctatcctgagtactggaaggcgctgggcagtcttggggtccaactgagctattaaagcgtcagcgtcggaatggggaggctctgcacatgatcattcgccaaccctgcccacccggcgcctgcgtctgcgaccgcgaacagctgctggagacgccgggcgccgaccagcgcatcctccagctcacgcgccaggaagagaagaagctgctcgaccgtcttgaagacctcaagagcctgcaggacctggagcgcatgcaacagctgatgtaccagcaactgggcatccgcgtgcatatcgcacctggccataccgaggtcaagagcatgcgcgggattcagatcgtcatcgacgatttgccggggatgtgtcgcaagacccgccaatcgatcccggcagcaatccgcagaggcctggaaaaacgcccggaaatcgcctaccgcctgctggacgcccacgacctgtttcgcgaaggttgaatcaaccggcaaccgcctcggtttcgaacagtccccgcccaacagccctggccttgtcgaggtgcgcctgcgccccgccgctttccgactccagcaacaattctgacgtcaccacctgcgcgccacagtaatcaaaaatcccgtagtcgatctgcgtgcgcatcgccttggcatagccatgccgatcaaaggcatcgtcatccgctgcgcccagggccagcaggtgcactttcaggtgtcgcaattttttcaccacaggtgtatcggggccgtactcaatggcccagccattgacgaacacgcggtcgatccagcccttgagcaagcccggcagcgaccaccaataaatcgggaacgccagcaccagggcgtcggcgcgatcgaggcgcgcctgttcggccagcacgtcggccggaggcgtggcgcggttgcggtggaccgcatggtcagcggcgttgtagcgtgggtcgaaaccttcggcggcaaggtcggcgatctcgaacgtgtggccggatgcgccgaggccggcggccacctgcgcggcaacgctgtgggtgagggattgcgggtcgtgatgggcaacaacaatcaacgcatgcatgacaaaaactcccgtttagggttaggctgggcttaagttacgattagtaagttacttttggtatataagcatgtcaagccctgcatcccctgccccacgccgtcgcctgtcccgtgaagatcgcctgcgccaattacttgaagtcgcctggcaactggtgcgcgatgaaggcaccgacgccctgactctcggccgcctggcggagttggcgggcgtgaccaagccggtggtctacgaccatttcgtcactcgcgccgggttgttgaccgcgctgtacgaggatttcgatgcgcgccagaaccaggtgtttgtcgacgccatcgaggccagcagcgccacgcttgaggatcgtgcctgggtgatcgccgcgtcctatgtggactgcgtgctgttgcagggtcgggaaattccgggggtgattgccgcgctcagcagctcgccggagcttgagacgctcaagcgccagtacgaggcgatctttctcgataaatgccgcgatgcgctgtcgccgttcggacggatttcccaggcgggtctaagggcaatgctgggggctgcggaggcgttgtcccaagcggcggccagtggtgagatcagccgtgaagaggcgcagcaggagttgttggcgaccatcctggcgatggtcaatcgtgggcgtgtcgaaggaataaccggcacggcggcggcaactggagcctgaaaaagccataagcgagggcgggttgtagtcagcaggcttgccacagcaagcccgctcgccacaaaaaaggttcactcaacgcccgtcaacaaacaaccgcaccttgcgcgccagttgatcgaggtgccgatcacgctgtttctccgcgtccaccatggcgcgcttgccatgcttttgcagcaggtacgtatgaatctgccgtacctccagcgagctgtagatcgctgccacatccagcacgcccatcaggccgtcggtgccgtagtgccgggtgttcatcaacacctgggtgccccgtgcaccacgcacttgaaagcccatgccctcaaatgcgggcaccttctccactgagcacgccagttccgcatggggataccggctcagcacgtcacgcatcattgcgcgggccacaccctggcggcgatagccgacttgcaccgccatgaacgccacaccgcaggcctcgggatcatccttcacgggcaggtacaggcaaaagcccatcagcttttcgccgtccatcgccaccaccaactcgaccgcaatgcctttggcaccgttgagcgcttccaggtagaggtgcacttcaaagcccgtggcgtattggtagatgttgtacagcaggttgctcggcggcagcgctacgctgctgatgtcggtgaggttatccaccaccagttgcaggatctggctgttgatcggctcggggcatggtgtggtgtagcgggtaaggctgtacatgcaaattcctggggttcagcgtcaaggcagcgcggattgtacctgttcggcgcatacctcacgcaaacacccacgcaaccagcgatgcgccaggtcggcatccagccgggggtgccagagcatcgccacggtaaagcccggcagcgtcagcggcagcgcaaagctgtagaggcctgcacgttgatgggtggtgtagcgctctggcacgctggcgatcaggtcggtgtcgcgggccagggcgatggcggtggcgaaaccggcgacgatggtgctgatctgccgcgtaaggcccacggcttccagcgcatcgtcaatctggccacggtcctgcccgcgccgggacacgtagacgtgttggcccgcagcgtaacgctcggcgctgaccgtgccctggctgagggcatggccactgcgcaccacgcccaccagacggtcgcggaataatgcctgggtcagcagttccgggctggcgctggggtcgaccacgccggtttccaggtcgacacggccttcgcgcagcattgcactgtccttgtcggtcttgttgatgaaccgcaggcgcacgccgggcgcctccccggcgatgcgcgccaacagggccgggccgacattctcgacgaactcttcgctggtgcgcagggtaaaggtgcgctcgacctgggccatgtccaacgattgcacggggcgtagcgcggcgtgggcttcctgcaccaggcgactgacctgttcacgcagttccaccgcccttggcgtcggcaccaggccccgcccggcgcgcaccagcaatgggtcgccggtggtctcgcgcagacgcgccagggcgcgactcatggccgatgcgctcagccgcaggcgtttggccgccgccgcaacgctgccttcggcgagcaatgcatccagggtgatcaacaggttgagatcgggcatcggcgctccttatcaggcgttgcatgcaggtattaactgcaactcatgcgtcttccgccatgttaggccacgccgtagatttgtgacagttgcgttcattcaaggaattacccatgcgcacgtcttcccgtggcagccttgtcagcctgtccctgtccatgttgctggcctccctcggcaccagcatcgccaacgtcggcttgcccagcctggcgcacgcgtttgatgcctcgtttcacgccgtgcagtgggtggtgttggcctacttgctggcaatcaccgcggtgattgtgagtgccgggcgcctgggtgatcgcctggggcgccggcgattgttgctcgccgggttggtactgttcaccgtggcctgtggactttgcggcatggcgctggcacttgaatggctgattgccgcgcgcatcctgcaaggcctgggcgcggcggtcatgatggccatggccctgggcatggttggcgatacggtgaccaaggagcgtaccggccgggtcatgggcttgctcggcacaatgtcagccgtgggtaccgccatggggccaagcatggggggcctgttgctcagtgtgtggggctggcgcgctatcttcctcgtcggcataccactgggatcggtggccgccgcaatcgcctaccagtatttgccggttgatcgcccctgcgcgccatcgtccataggccgaggttcctggtccttcctgaaggcgccaacgttacgcgccggcctggccatgagtgccttggtcgccgccgtgatcatggccacctttgtggtcgggccgttctatctgtcccgcggcctggacctcgaccctgagtggatgggcctggcgatggcgctcggcccctgtgtcgcggccttcaccggcgtaccggccggacgtctcaccgatcgcttcggcagccaacgcgtgacactcgccgggctgggagtgctggcctgtggtgcgctgttgttgtcgctggggtccggactgatcgcctaccttgcctcgctggtcgttttgacgacgggctatagcctgttccaggccgccaacaacacggcggtcatgagcaatgtggacagctcgcagcgaggcactgtctcggggctgctgaacctgtcacgcaatctcgggttgatcgtcggcacgtccgtactgggtgccgtgttcgcctgggccagcccggacgtgacccgcgccctgccccagtccgtggcctatggcctgcataccacgttcagcgtggcgctggggttgatcctgctggccagtgtgatggcatggcgtcgcttcagcgcttgtaacggcctccagaacacccattgaggcaaaaaaacaaaaaaggcgttgcgccagaccgggttacatcgcgcatcatgggcactttcaagctcaagggtaacgtccatgcgcgttctgtcattgatgatgggtcttacgacgctggccgccagtacggtgttctgcgccagcgcgatggcgaatgaagaaagtcagttggtacaacagatcaaccaataccgcagccaggtgcagcgctgcggcgaccagggttcccaggaactgccaccgctggccagcgacacacggctggtgctgccggccaccaatgtgggcgacttgcagcaagcgctggcacgcgccgcgtacccgatggtcaacgtgcaggccatcagcctgtccgggcccaaggatgcccaggcggcgatgaaggccgtgcgcgaaagcttctgtcgcgtggtgctggacccgcaatttgttgatatcggcgtgagcaacagcggccaggactggcgcatcgtgcttgctcgcccgctgctgaccagtggcctgggcgactggcagaccgaaggcaggcaactgctcaacctgatcaacaccgcgcggtctcagccacggcaatgcggcacccaggcgtttaccgccaccacgccgttgtcgtggaatgacgacctggccggcgccgccaacagccacacgcgcaacatggccaacggcaacttcttcgaccacctcgaccacgacggccgcacaccgggcgaccgtgcggagttggccgggtacatcgcgaagaacatcggcgaaaacatcgccgccggcctggacacgccacgcaaggtggtcgacggttggctcgccagcccgggccattgcgccaacctgatgaacccgcagttccgcgaactgggcgcggcctatgcgatggacccgaagagtgacgcagggatttattggacggcggttttcggcgcgcaataagcaggtttgcagatctatccatacggatagtgcatcaaattgctatcaccgcgataatcccgctgaactgccagcgggctttccggtctgttgcttgtcaggccctcccttccaggcgttaaacagaccgcggtaaacaaggtgttcttgcaatgatgaattggctgcaaagcagcagcgagatggctgagcgggtgcgccagcatgattgggcgagtacgcccctgggcccgctggaacagtggccggatgtgctcaagaccacggccgcactgtgctttgcctcaagctttccccaggccatcatctgggggccacagttgatcacgctctacaacgacgcgtttattccgatcctgggcgataaacccgacgcattgggccgcccgttcagcgaaacctggcacgaagtctgggaccaggtcagcccgatcgccgacgcggccttccaagggcacgcgacctatatcgaaaacttccccttggtgatcgagcgtggtgccgggcctgaacaggcgtatttcacgttctgctacagcccgatccgggaccccaatggcaagatcgtcggcatgctcgacacggtcaccgaaaccaccaccaccgtgtttctcacccagcgcctggcagccctggacaccatcggcaacgcggtcgccaccgccaccgatgccgaacacatcatggccaccaccacccgcctgctggccgagcacctgcaagtctccaactgcgcctatgccgacatggatgccgacgaagacggttttaccattcgcggcaactgggcagcgcacggctcgccgagcatcgtcggccattacagcctggcctcgttcggcgcattggcggtgcaacgcctgcgcgccggcgagccgctggtggtgcaagacaatcgcctcgagttcacccctgaagacgccgccagctatcaggccttgggcgcattggccaccgtgtgtttcccgctgatcaagcacggccgtctcacggcgttgatggccgtgcatgacaaagcgcctcgggcctggtcaccctacgacctggcgttggtgggcgaagtcaccgagcgctcctgggcgcacatcgagcgcgtgcgcgctgacgccgccgtgcgcgaaggcctggcagccttcaccgaactcaatgccacactggaacaacgggtgcaggaacgcaccgcggccctcacccaggccgaagctgcgttgcaccagtcccagaaacttgaagccattggtcaattgaccggcggcgtggcccacgacttcaacaacctgttgaccatcattcgttcctcggtggacttcctgcgccagcctgggctgtccgaagaacgccgccagcgttacatgggggcggtgtccgatacggtggaacgggccagcaagctcaccagccagttgctcgccttcgcccgtcgccaaccgctgaacccggaagtcttcgatgcgggccagcgggtcaagaacatcgccgagatgctcgaaagcgtcaccggcgcacgcatccgcgtacaggtgcaattgccagagcgcccctgccatgtgcgggttgactccagccagtttgaaaccgccctgatcaacatcgccctcaacgcccgggatgccatggacggccagggcaccctgaccctgcgcgtcgccacgctcgaggcactgccgtgcatccgcggcgatgcgcaggcactccagccatttgtcagcgtctccctgaccgacaccggcagcggtattccgggcgataccttcgagcgcattttcgagccattctttaccaccaaggcggtcggcaaaggcactggcctgggcttgtcccaggtgttcgggtttgccaagcagtccggtggcaacgtcgacgtggccagccgcgtgggccagggcacggtgtttaccttgtacctgccggaagtggccccgcaaacaatgcccaacgtgcagcagcaggaagatcttgcgccggtccacaccgcagcgcagcgccatatcctcatcgtggaggacaacctggaagtgggccgcttcgccaaccagatccttcaggacctgggctaccgcaccacctgggccaccgatgccgaacaggcactgaccctggccggcgccgatgccctggccttcgatggggtgttttcggatgtggtgatgcccggcatgaccggcgtggccatggccaaggtactgcgtcagcggcgcccggacttgccggtggtgctgacttccggctacagcgaagagttggccgacagcggctacgaagggttcgagttccttgccaagccctactcggccgatcaggtggcgcgggcactgaccaaggcgatgccctagcgaccaggcctggttgccaaagaagcccgcttgctacaatttgaagtcttactccgccaccgccacctgattgcggccctgggccttggcgcgatacagcgccttgtcagccgtattcatcaggccgtgcaggtcttgatcctgagtgtgggtggacgcaacaccgaggctggccgtcaacccatgcaccggcgcggaggacaggccggagattgccttgatcaactgttcagcgataacccgtgcggtttccagcgaagtgttgggcagcagcaccgcaaactcttctccacccaggcggccgtacacatcagcctggcggaacgaagcgctgatcaccccgccaatctggcgcaacacctggtcaccggcctggtggccgtaggtgtcgttgatttccttgaagtggtccatgtccatcatcagcgcacacagcggctgacgattgtggcggcattgttcgtacaacacctgggcatgctcgaaaaaggcgcggcgattcatcaggccggtgagttcatcggtctgtgcggcgcgagtggaaatgttgtgggcacgctccatttgccgggtcaggcgaaaggctttttccagggcatcggacaacttgcgcgtggcgctcaccacaaaggtggaaaacaccagtaccgcgacggccacacccacctgcatagaggaaggctggaacagcaaccatagggtacatggcagtaaaaccaggcccatggaccccagcgtcatatagcgataggccgagtaacacgacactgcactcaccgacatgcccacggtgaacagcatcaccagcgcctgggagagccggtcatcggtgggcatcaccgccaacgcgccaaagccccagataccggccgacagcatcagcgtggtccagtagcggcgctcccagcgatccggggtgcgctcggcgttggggcaacgaaaccactccatgaacatctgcagtcgcagcaacgtcgaggctgccagcgtcaatagccagatcagcatgacttgatgatcaaagcggtcccaacacagccagcagagcatcatggcgcccaagtagctgccgaagatggcggcaaatgactgccggaacagctggtgcaaacgatcagtccgcacctgctcctctataaagcaatcctggtcctgcccacgcccaaggccattcatgaaattcgcccgattcgactgctacgacaaaggcgccattgtggcaccctgccagtagcgtggacaacagaatccagcacagtagagcctttaaagcgcttccggacgcagaatcaacacgccaaggggtggcagattcagcgacagcgacaccgcttgaccatgacggggctcatcctgggtgaacacctcgcccccattaccgtaattggaacctgcgtacatatcggcgtcactgttgatcacttcgctccagcgcccagcaaaaggtacaccgacggcgtaaccctcacgcggcaccggggtgaagttggccaccaccagcaccggcttaccgtccttgctccagcgcagccaggcatagacgctattgatcgcgtcatcgccgatcagccactggaagccctggggtgcgtcgtcctgttcatgcaaggccggctcttcgcggtacagccggttcaagtcccccaccagcttttgcacgcctttgtgctcggcgtattgcaacaagtaccagtccaattgctggtcatggttccactcgcgccattggccgaattcgcagcccatgaacagcagtttcttaccgggatgcatccacatgaacgccagataggcgcgcaggttggcgaatttctgccagcggtcgccgggcatcttgtcgatcagcgagtgcttgccatgcaccacttcgtcatgggagatcggcaggatgaaccgctcggaccaggcatacaccaggccgaaactcagttcgttgtgatggtgggcacggtacaccgggtcctgctggatgtagtgcagtgagtcgtgcatccagcccatgttccatttgtagttgaagcccagcccgccctgttgggtcggctggctcacgcccggccaggcggtggattcctcggcaatcaccaacgcacccggcgcttcctgggccaccacgtcgttcagatggcgcaggaagtcgatggcttcgagattctcacggccgccatggcggttgggcacccattcgccggccttgcgcgaatagtcgcggtagagcatcgacgccacggcatccacgcgcagcccgtcaatgtggaaatgcttgagccagtgcagcgccgaagccagcatgaagccgtgcacctcggtgcggcccaggttgtagatcagcgtgtcccaatcctggtggaagccttccagcgggttggcgtattcgtacagcgcagtgccgtcgaattgcgccaggccgtgggtatcggtaggaaaatgcgccggcacccagtcgaggatcacaccgatatcggcctggtgcagcgcattgacgaagtaggcgaaatcctgcggcgaaccgaaccgcgccgtgggagcaaattgtgacaacgcctggtagccccaggaaccgccgaacggatgctccatgatcggcatcagctcgacgtgggtgaaacccagttgctgcacatagggaatcaggcgttcggccagctcacgccagttgtattgccgggccacttcgcccgcctcgtccaactcgcactgccaggagcccacgtgcagttcatagatcgacaacggcgcggtggccttctgcttatcgacccgcgcctgcatccattcatgatcctgccagtccacctgcaacggttcggccaccttggaggcagtgtccggcggcaactgggtggccagcgccactgggtcggccttgagcggcaggatcccatgggcaccgagaatctcgtacttgtaggccgcacccggttgcaggcgtgggatgaagatctcccacacgccggaaggatggcgcaagcgcatcggatgacgccgaccgtcccagatattgaagtcgcccaccaccgacacccgccgcgcattcggcgcccacacggcaaagcgcacgcccgccacgccatcgacgctggtcacctgggcgcccaggcaactgccaaggtcgcggtgattaccttcggcgaacaggtacaggtccatctcacccagcagcagttgctggaagctgtacgggtcttcggtaatctgctcgccaccagcccactggattttcaacaggtacggctgacgggtcttgaactggccgacaaacaggcccggcacctggctcgcgtccaggctgccgagcgcctcgccactgtcgcgggccagcacctgaacactcaaggcctcgggcaggaatgcacggataaactggccgccgtgatcatcatcgtgtggcccgagaatcgagaacgggtcgtggtgttcggcgcggaccagcgcttcgacgtccttggacgccggcaatgcagtcagtttcggttgcagcggttctttatgtgtaaagctcatgacgtctccccaccgcgtgcagtgttcgatataggtgcgataccgctcaacaatccgtgcaacccttgcaggggcaccggcaaccaggttgggcggttttctgcttcgtaagccacttcgtacgcggccttctccaggctgaacaacgtcagcgcggcgtcctggcctttggcatcctgccagtcatgcgccagtgtagccgtcgccgcctgataagcccggataaaggcctggcgtgcttccttgaggtaacgctctgtcacgcgtctgcgcgcctggtccgcctcgggcgagtgatccaccccttgaacattcagggccatcgccgccgcatagtcgaatgagcgcaatacaccgctcacatctttgtacggactgtgcttgccacgtcgctcatgcaatggccgcgccggctccccttcgaagtcgatcaggtaagcatcgcccttcaccaccagcacctggcccaagtgcaagtcaccatgcacacggatgcgcaacccgcccgccgtggctttcgccaaagcctgtacatggctggcgatggcttttttctgtgccagcaaatcactgaccagcacttgatccgccgggttcaactggctttgatgaagtttgagcaagtgcagcgcacggtccagttgcgcgccgacatccttggcccaggcctgggtgtccttggccgtggtgacttcgggtttgaaggccttgtcggtagttttggcgccgagcacctggtgcatttcgccgaggcgctggccgagcaagccggcaaaatcggccagctcgcccagggcgttgtagtgttgttcctgctcggaaatggcctcggccagttcgtcgcggatcgcccgctccaggttgttctgggtccagctccaggcgtcgccctggttgctcaggtagccctgggcaatcatcagcagattgtcctcgccctcggcgtcgtggcgcaccatcgaccccagtagtggcgaaatgttcgggtagcccgcagctgtcagataagcactcatctccagttccgggtgtacgccggaggcgactttgcggatcagcttgagcaccaggctctcgcccaccaccaccgagctgttggactgctcggccgacaagtaacgcacctccgcctcatccgtcagttgcagcttggccaaatgcggtgtggcagcaaagcgcagctcgccgtcactggtctccagcacggtgcccgcctgcaagccctggatcaccgcacggatgaagtgctcaaggctgaaggcgtcggtcaccaaccccacctggcgcacccgacgtactcgggccagcgccaattgctggggcaaggcgctggtgaattgatcttcgccaaggaaaccgaacggcaactggtaacggctgacctggcctgcggccgtcacctcgacttcactgagcaacaccggatgctgcgcgtcgccaaatcgcacgccgtaggcaatgcgcacgctgtcgatcgccgtgtccttgccagcgaaccagcggcgcttgggcaaccacgctggcagagcggtctgctccagggacgctcggcaaggttcttccagcagttcttccatgcgttttttcaataccaatgtggtgaagtccggcatgctctgagccggttccacatgccagctgggcatctggttttccggcgccagcacaaaccagtagaaaccgtagggcgccagggtcagcaggaaattcaactggccgatgggcgggaacgcattaccgccaagcatttccaccggcaccatcccggcaaacgccgacaggtccagctccgccgcctgggcactgcgcgacacgttggccacgcacaagatgatctcgttgcgcccgtcctcaccggtaaattcgcgggtataggccaggatgcgccggttgctcggcgagagcattttcaggctgcctcggccaaaggccttggactgcttgcgcaccgccagcatgcgccgggtccagttcagcaacgaatgcgggtcctgggcctgggtctccacattgaccgactgatagccatattgcgggtccatgatcggcggcagcaccaggctggccgggtcggcccgggagaaaccgccgttgcggtcgatggaccattgcatcggcgtgcgcacgccatcgcggtcacccaggtagatgttgtcgcccatgccgatttcatcgccgtaatacagggtcggcgtaccgggcatcgacagcagcaggctgttgagcagctcgacacggcggcggtcgcgctccatcagcggtgcgagccggcggcgaatccccaggttgatccgcgcacgccggtcggcggcgtagtagttccacaggtagtcgcgctctttgtcggtgaccatttccagggtcagctcatcatggttgcgcaggaaaatcgcccactggcaattggcgggaatctccggggtctggcgcaggatatcggtgatcgggaagcgatcttcctgggccagggccatgtacatgcgcggcatcagcggaaagtggaaagccatgtggcactcgtcgccgtcgtcgccctttttgtcaccgaagtacagctgtgtgtcttccggccactggttcgcttcggcgagcaacatgcggtcggggtaatgggcatcgatctcggcgcggatctgcttgagcacgttgtgagtctcaggcaggttttcgttgttggtcccatcgcgttcgatcaaataggggatcgcatccaggcgcaggccgtcgatgcccatgtccagccaatagcgcatcaccgacagcacggctttcatgacctgcgggttgtcgaagttgaggtcgggctggtgcgagtagaaacggtgccagaagtactggccggcgaccgggtcccaggtccagttggacttctcggtatcgaggaagatgatgcgcgtgccgtcgtatttctggtcgtcatccgaccacacgtagaagtcccgcgcagccgaaccgggcttggccttgcgcgcacgctggaaccaggggtgctggtcggaggtgtggttgatcaccagttcggtgatcacccgcaggccgcgcttgtgcgcctcggcgatgaagcgcttggcgtcggccatggtgccgtagtcactgtgtacgcctcggtattcagcgatgtcgtagccatcgtcgcggcgtggcgaggggtagaacggcagcagccagatagtgttgacgccgaggtcggcgatgtaatcgagcttggcgatcaggccgggaaagtcgccgataccgtcattgttggagtcgaaataggatttgacgtgaacctggtagatcaccgcgtccttgtaccagagcgggtccttgatgaaggtggcagcgttgggtttcttcgccattggaaactcctgaaatacttgaaccactcggtcaatgtgggaggtgcagtgcgacgactcgacctgcacccgatgatggtgtgtcagttgatgaagctgtggctgacacaccgcaatcgggggcaagtcgaatcgtcgcaccgcccctcccacattgaccgcgcggggcttaagaggtggtgatacgccagatcccgaacggcatctgcggctccagccgtgtccactggtgcttgccataccaggtccagcggtggccattcatcaagtcttcgccctgggtctgggcatcgtccggcagccccaattcccacagcggcaactcgaagttggcctcctgcgcgttgtaagggtccaggttgaccgccaccagaatgaagttgctgccatcctcgctgcgcttgccgaaatacaggatgttgtcgttccaggcgttgtagagcttgagccccaagtgtgtctgcagtgccgggttctgccgacgaatgcggttgagctgggcgatctcggcgatgatgttgccgggggcggtgaaatcccgtggacggatttcgtatttctccgaatccaggtattcctctttgccgggcaccggggccgcttcgcacagttcaaaacccgaatacatcccccacaggcccgagcccatggttgccagcgcagcgcggatcaaaaagcccgcgcgccccgactcgtgcaggaagccagggttgatgtccggtgtgttgacgaagaagttcggccggtagcattcacgccacggcgattcattcaactgggtcaggtactcgctcaactcggccttggtattgcgccaggtgaagtaggtgtagctctgggagtagccgaccttgcccaggcgcgccatcatcgcgggcgtggtgaacgcctcggccaggaagatcacctcggggtaccgggcgcgcacatcgctgatcagccattgccagaacggcagcggcttggtgtgggggttgtcgacacgaaaggtcttcacgccctcttccacccagcccaccacgatatcgcgcagctcggtccacaggctcgggatcgcatccgccgcgtagaagtcgacgttgacgatgtcctggtattttttcggcgggttttccgcgtacttgatcgtgccgtccgggcgccagttgaaccagcccggatgctctttgagccatgggtggtcctgggaacactggatggcgaagtccagggcgatttccaggccgtgctcggcggcggcctgaaccaggcggcggaagtcgtcgcggctgcccagttgcgggtgaatggcttcatggccgccctcttcgctgccgatcgcatacgggctgcccggatcatcggggccggcggtcagcgagttgttcttgcctttgcggtggctgcgcccaatggggtggatcggcggaaagtacagcacgtcgaagcccatgtcatggatcatcgacagccgtgaatgcacgtcattaaaggtgccgtggcgtgcaggatcgtcagtgatcgagcgcgggaacagctcgtaccagctggcaaacaatgccgcttcgcgctccacatcgatcgggtacaccgtgctgatgctcaggtaggcgcggtgatctgcctgggtcatcaaatgtgcactgtcttcgtgcaggaactgcgcaacctgctcggtttccagcagcccggagagttcgtggtgcagcagcatcaggcggtcgcgcagctcgttgtcactgcgctcggcggcctgcagcaccaggctgcggccttcttgcagctcgaggctgaccggcacaccggcctcgtgcttcttgcgcagttcgtagcaaaagctggcgaaggtgtcgatccaggcttcgatgcagtactcgtgggggccttgctgggccacggtaaacgcgccctcccagccattattgcccacgtcgttcatgaccacgctgtgccaactttcgtcttgcaacgggcgccagcggatcagcacggccagcttgtcatggccgtcggcgaacaccttgctggtgacgttgacccgctggccgaccacggccttgacggcaaattcgccgccgtcgatcacgggggtggtgctttcgatcgcgatccgtggcagcaacagcgcctgggacagcggcaataaggatgggtctggaacctgtgtttcagcagtcatcgagcatcttccccttacgccctgtggacgctctttgcttgatccgaaattctgatacggcagcgctctccctgagcagagccgtcataggtccgagcctgcgtgccggttaaaagttcaggtggatgtgccgccattgggcggggaatcaattcgccctggcgggtgtccaccgatagagcaaagcacaaaggaggccacaccgatgaatatcccgatcccggctgaaaccccggacccgaatatcgataacccgaccttgccaccgaccgagccagaaccgattccggaaaaagagccaccggaaaacccgccgccgtcggtggaggagccgccaacaacgatgccgccggtgattgtctgaacattgtcagaagtggagggctcgctcgtgcgcagacattgcttcaggcgcacgggcgaacggttgagaaaagtaaaaattcccactcagctgtcagacccgtcctaagctctagcgatgccactcactcttacactcatcccgcgagggcgcataaccaccgccttggctatatcgtgcaaccacaagcctcacgaggatgaatcaatgtcgactatctatccccagcagggccgctcatcgcccggcgtgcagcccacactatccaactccacgcccggccaacctgggctgacgtctgagcgtatcaatgggctgctaaagtctggccccaattgttccatgccccacaaacagcccgagccggcaccgaacacacccgcacctcgagcatcttctgggcccgaggcgcgcaacgcggcgagcgaacttgaaacactgttgaccgaaaccaacatcgaaaagatgttgcgcgaaccagattccaaccaaagcaaggaattacttgaacggtccaagaagcttgcgaacgaaatcgcgatgaacacccctcactcggcggcaaacgccaagacgccttgggcatccgtcaaccagttgtcccatgacaagatcaccgcacaggccaaaaaagtcatcaacgagatgagagaaaggcatatacaacaaatcgagctcgacaatttctctcagattgcaaaggcatttgatagcgacggggtgggggatagcgttgcgtacatgaacaacgcacaaaatggccttgccgacctcaagcaaaaattttccagaatcgaggcaacagccaaaaaaattgaggagatgggcacacagttgaacgcgacgctgcgctcatcacctgccaatacaccctataacgctgacgccaaaacctaccgttatggttcgctcagcgagtccccattgaatgcgcccagcgaaatcaaaaactttaacaacaacgacaaaatcgacctgaccaacatccaaaaacagctgaacacgccattgcacctggtggaaaaattttctggagcccgtggtgaaatgcaaatccattacctgccgagcacccggacaagcgtgctcatcgtggcgaacgatcccggaaccccccctatggtgatcaaggtgtttggcgagctgcgttatcaaaatctggtcacctgaccagaccttgttacccagttttcttctccagcagcttgacaatcctcggcatcacattgaacaccaccagggccaataaagtactgagcacagcggtcgactcgcgtcccaaccccgccgctaccccaatggcggcggtcatccacaacccggctgccgtggtcaggcctttgacgtgctggccctcttcatcctcattgcctttgagaatggtgccggcaccgaggaacccgattcccgcgatcaccccctgcaccacccggctcattgcgtccgcctgatttccggacatctgcggcaccatcacaaacaacgcggcacccaacgccaccagcatatgggtgcgcaccccggcggccttgcccttgctctcgcgttcaaagccgaggataccgcccagcactgcggcgatcagcaggcgcacggtgatctgagtaagctgcctggcgtcgccgatgtcggcgaattcagccagcagggtttgccacacttcatgccaccaggcgtccatggatgccgtcctttatcgttattggtaaaggatggacagcggcgaccgccagtcagttgcctggaacccctgcacatcgccggcccctaaccttgcatagtccacgagaaaggagatcggcatgcccattcgtatcgaaaaccaactgtgctacttcatgctcgacgacaacggccaggaacagagcgtgccagcgacgcgggtcaatatcgcgaccgacaccgacaaatccatgtcctacgtggagttggccgccgagcggatctatatcactgaagccgaggccgacgccctgacggtcgccggggcccacgatggacgccagcatgtaaaggccgaaaaacctggttcgctgatttgattgatctgtatcaacacacacgttgcagcgctgcactctaggcgacacagggtgcagcacattgtcgcagcacgccgcacgcagcccatctgatccgctttttatcactctacctgagtctgttatgcaaacagtgtcccgcgcatagttcatcggcctgatggaggctgatgagcgaacgaccatgagcgaaagaatcccaaccgtggaaacctttgagcccatacacccaaagaaggtgaaggccaaatccagcgacaacctgattcatacccgcagtttcactggcctgttccgcaccttacgggtgagcggcgcgggcttgctgttcctggcgtttttcggcacggtctggttgaactggggtggccggcaggcggtgctgtgggacctggctgaaagcaaattccacatctttggcgcgaccttttggccccaggacttcatcctgctgtcggccttgctgatcatttgcgctttcggcctgtttgcgatcaccgtgttcgccggtcgtgtgtggtgcggctacacctgcccgcaaagttcattcacctggctgttcatgtggtgcgagaaagtcaccgaaggcgaacgtaaccagcgcatcaaactgcaagccgcgccctggagcttgaacaaactggcgcggcgctcggccaagcacaccttgtggctaggcatcagtgtgctgaccgggctgacctttgtcggctatttcacgccgatccgccccctggccagcgaactgctgacctggcagatgggcggcgtcagcctgttctgggtgctgttctttaccggcgccacttacatcaacgccggctggttgcgcgaagcggtgtgcatgcacatgtgcccgtatgcgcggttccagagcgtgatgttcgacaaggacaccctgaccatttcctacgacgcggctcgcggcgaacaccgtggcccgcgcaaacgtgaagtgaaacccgccgatgtcggcttgggcgattgcatcgactgccagctgtgcgtgcaggtctgccctaccggtatcgacatccgcgacggcctgcaaatggaatgcatcggttgtgcggcgtgcatcgacgcctgcgattcgatcatggacaagatgggttacgcccgcggcctggtgagctacaccagcgaacatcaactgcaaggcggcaagacccacctgctacgcccgcgcctgatcggctacagtgcggtgctgctggtgatgatcgcagccctggtggtggccttggtggaacggccgatggtctcgctggacgtgaccaaggaccgtggcatgttccgcgaaaacgcacagggcctgatcgaaaacatctacagcctcaaggtgatcaacaagacccagcagcgccaggactaccgtctggaactggtggacgcgcagggcttccagttgcagggcaagaccgagatcagcctggcaccgggggaaatcagcgacgtgccggtgtcggtggcattgctggcggacaaaccggcgagcagctcgcagaccttgcgcttcaaggtctcggatgtggacgagccgtggatctacagtgctgccgacagccgctttgtggcaccgctgaaccgctgaaaacacatttgaaaggctaatcaggtcctcatgaaacgctacgaaaaatttgccgacgacatcgcagaactgatccgctccggcgtgctcggccccggccagcgggtgccctcggtgcgctatgccagccagacctacggcgtcagcccgtctacggtgttccaggcctattacctgctggagcgccgtggcctgatccgtgcacggccgcgttccggctacttcgtcaacacccacgcgcccagcccgttttccgagccggtggtgagcgagcaagtgcatgagtccaccgaagtggatgtgagcgagctggtgttctcggtgctcgactcgatcaaggaccctaacactgtgcccttcggctcggcgttcccaagcccgatgctgttcccgttgccgcgcctggcgcggtccctggccagcgccagccgcgaaatggacccgcgcctggtggtcaccgacatgtcgccgggcaacccgcaactgcgtcggcaaatcgccctgcgctacatggtcggcggcctgatgctgcccatggaggagctgctgatcaccaatggtgctctggaagccctgaacctgtgcctgcaagccgtcaccgaaccgggcgacctggtggccatcgaagccccggcgttctacgcctgcctgcaagtgttggagcgtttgaaactcaaggccgtggaaatcccggtgcacccgcgcgacggcatcgacctcaacgccctggcgcaatccctgcagcgctatccgatcaaggcgtgctggaccatgaccagcttccagaaccccatgggcgcgacgctgcccgaggcgaaaaagcaggcgctggtggaactgctgcgcgagcatcaggtgccactgatcgaagacgatgtgtacgccgaactgtattacgggcaacaggcccctaaacccgcgaaggccttcgacacagatggcctggtgatgcattgcggttctttcgccaagagcctggctcccggctatcgcgtgggctgggtggcggccgggcgttttgcgcagaaggtcgaacgcctgaaactgatgacgtcactgtgcccctccatgccagcccaggcagcaattgccgattatctgcagcacggcggctatgaccggcacttgcgcaagttgcgctatgccctggaagaacagcaaagcgccatgctggcggcgatcgcgcgctactttccggcacagacgcgggtcagccaaccggccggtgggtacttcctgtggctggagctgccggagcagacggattcgttgaagttgttccagatggccctggcgcagggcatcagcattgcgccggggccgatcttctcggcgacccagcgcttcaggaactgcattcgcctgaactacggtagcccgtggaccgaggcgtcggaaaaggcgatggagacgttggggcggattgtgcggtcgttttagttgtaacacagtcactgggacctaacccggcatgatgccaaccagtgacttctccttgataccgagttcctcatgtacaccaacaatagccctgcaatcaccctacacctcacggagcagaattggcgcaatgctcccaaccacccggaaggtcgaccatccggcgaccaccgtagcgccaaacagattatcaacgccaatccggcggtcaaacatctattacggcgccgagacagctaccccactaccgacctgctcaaacgtcaattgggtgactggacttccgcgaatcccagcgcccgttcgcgcgccgatgcagcctacaacctggctcgggtggtcaactttctggataacgtgaatgaccgcacagtgggcaacagcgaaagccgcgatggcaaaatcaacggttttcacaatgcgggctattccacccgtaaaaactcggaggcacgcttgctggtggcctttgcggaacagggctacgaggtgctaagaaacctgggcgcatgaatgcccggacttcagcggccaccgcccagatcgaggaacgtcccagtggcatacgacgccttgtccgacagcagccagataatcgcttcagccacctcatccgggcgcccgccacgggccatggggataccggattcgagtttgctgacccggtccgggtcgccgctcagggcatggaagtcggtgtagatgtagccagggcgcaccgcgttgacgcgaatgccctcacccgccacttcttttgataggccaatggtgaaggtatcgagcgcgcccttggaggcggcatagtcgacatactcaccgggcgaccccaggcgcgccgccaccgacgatacattgacgatactgccgccctgcccgccatgcttgggcgacatgcgcagcaccgcgtgcttggcacacaggatcggccccagcacattggtcttcatgattttcaggatacggaactcggacatttcgtccacacgggacttgtgtcccacggtgccggcgttgttgaccagtgcggtgacacggcccagttcggtgtcgacgcggtggaacagcgcaatcacttcatcttcaatgctcacgtcggcgcgcacggtaatcgcctgggcgcccagcgcgcggacttgttcgagcacacggtgggcagcctcttcgtcggactggtagttgatgcagatgcggtaaccctggcgagcggccagcactgccgtctcggcgccgatcccacgactgcctccggtgatgatgacgactttgtccatgcgtgcggtctcctgattcaacctgatgtttagggctggatccaagaatacccgtcacgcacggcttttgtcaggcgcaagcgcgtcttcggcacgctggatgtcggccatgaatccgtccgccggcaacggatggcccagcaggtaaccttgcagggagttacaccccaggcgcgtgagaaagctctgttgcacatcggtctccaccccttcagcaacaattcgcaggcccagggcctggccgagggcgacaatggccgagacgatggcggcgtcatcgctgtcgtgctccaggtcgcgcacaaacccacggtcgatcttcaactcgttggccggcaagcgcttgaggtacatcaggctggaataaccggtaccgaagtcatcgatggacagatcgacgcccatgtccgacaactgctgcaacaccgtcatgctcgcatcggcatcgctcatggcggtggtctcggtgatttccagggtcaggctattggccggcaaccgatgacgttccagggcctcggccacgctcttgaccagcccggcgtggcagaactgcagcgccgacaggttcacggcgatgcgccaatcttcgtagccctgggcgtaccacaggctcatttggcgacaggcttcatccagtacccattccccgatggggatgatcaacccggtcttttccgccagttcgataaaggttgccggcaacaacaggccctgctgtggatgctcccagcgcaacagcgcttcggcgcccaccgcaatgccactggccgcgtcgaacttgggctggtagtacaggcggaattgttgttgctcgacggcattgcgcaagtcctgcaacaactgcaattgcttgcgcgcgttggtgttcatcgacgcatcgaaaaagctgtagccgttcttgcccacgcccttggcgtggtacatcgccgcgtcggcgttcatcagcagttcctgggggctgttgccgttgcctgggaaaatggcgatgcccacgctggcggaaatcttcagctcatgctcggccacctggaacgcacggttgatcagcaccacttggcgttcggcaaggccgagggcgtcgtccggctgggtcaattgcaccagcaacacaaactcatcgccgccgatgcgcgccagggtgtcatggctgcgcaagtcttcacgcagacgcaggccgacctcgcgcaacagctggtcacccatatgatggccaaaagcatcgttgaccggtttgaagccgtccaggtcgataaacatcagcgcaaagcagccgccctgctctttcaccgcctgcatggcttgctggatgcggtcggcgagcaaggtgcggttgggcaggccggtgagcatgtcgtgcagggccaggtgggtcagctcctggttggcctggctcagggagtcggcgagtaccgccgtgcgcgcttccaggcgtgcgtcgagcaacgaagtcagtaaagcgatggccagcaccgccagggtggtgaccagcaccaggttatccagacccttgccgctcaacccgttcagtgccgcgccgcagaagctttcatcggcaaagcgggccgctgccatgccggtgtaatgcatgccgacgatagcaaaccccatcaccaccgccgctccaccacgggccaggcgcacatacggcgtattgcggcgcaaattatgggcgatccacaacgctgcgccggaggccaccaccgcgatcaataacgaagcgccaaacaacgtcgggtcgtagtcgatgcccggcgtcatgcgcatcgccgccataccggtgtaatgcatgctggcaatgccggtgcccatgatcagcgcacccaaccccaactgccaggccggcaggcgcggttggctgaccagccataatgcaaagccgctggacagcaccgcaatcagcaacgacagcgcggtaatccccaggtcgaagcccagggcaaacggcaagcgcaaagccagcatgccgatgaagtgcatcgaccacacccccacccccatcgccatcgacccgccaatgatccatatatagacggcgcggcctttggcggtggcgatgcgcccggaaaggtccagcgcggtgtaggaagcgaggatcgcgacgaacagtgagatcacgaccagtgagggcgaataactaccgatgagcatgggacttctcgtgcacaaagggcccgagaggcccgtgcgaaatggcaaagcgggcgattgtagcgagaataattcttgaacagttgattaattatcagagcgccattagtggcattttgacgccaatcctatggctcagaaacgagggtttgctgaggtcaaatatggcggtgagcggacctattgtggtgagcgggcttgccccgcgctggagtgcgtagcgctcccgttttttggggccgctgcgcggctcagcgcggggcaagcccgctcactacagcaagcccgctcattggatcgagttcatcgttaatttttgtcggcaatcggcgtctgtccatcccagccgccgcccaaggcggcgatcagttgcacactggccaccaggcgcgtctgcagcaaggtcagcaccgtgcgctcgttgctcaacgccgtggcttgcacggtaaccacatccaggtaggcaatcagcccggccttgtactggttctgggtcaggcgcagcgactcgcgtgctgccgccagcgcttcgttgctgaccaccgcctcgtcctccagcaccttgagttgcaccatgtagttttccacttcacggaaaccatccagcacagtctggcggtacttggcgacggtttcgtcataggaggccacggtgcggtcgacttccgccgagcgctggccgccatcgaacagggtcatggccagcttcggccccaccgaccagaagcggttcggcaggctgatccagtcggcgtaggtgctactggaataaccaccggccaggctcagggtcaggtccgggtagtaggccgccttggccacgccgatattggagttggcggcgatcaccgagcgttcggccgaagcgatgtccgggcgacgttccagcagttgcgacggcaggctcaccgggatctgcggcagtgccgggatgtctttgctgaccgccaggttgaagttggccggcgcctcgccgatcaacaccgcaattgcgttttccagctgggcgcgctgccagatcaagtcgatcaggctggcctgggtggtcttgagctgggtttgcgcctgggccaccgcgtccttgccggaaacaccggcgcggtactggttttcggtcatttgcagggagcgctgataggtctccagggtcgcttgcagcaggcgcgtctgttcatccatgacgcgcagttgcaggtagctttgcaccagttccgattgctggctcaggcgcatcgctgccaaatccgccgagctggcttcggcgctggcctcgttggcctccaggccacggcgcaacttgccccagatgtccgcctcccagctcacacccaactgtgcgttgagggtgtcgcgaatgccgctgctggaactgctcaggctcgcgctgctgctgccggtgccctggctggcccgggttttccccgcgctcaggtcgacggtggggtaaaacgccccacgggaactgcgcaccaacgcctgggcctggcggaaacgcgcttcggcctgggccacggtctggttggaactgttcaggcgcagcaccaggtcattgagctggcggtcgccgtacaactcccaccaggcaccacgggccagggaatcactgggggtggcctggcgccaccccttggcttccttgaattgcgccggctcgaccacgtccgggcgtttgtagtcggggccgacggcgcaggcgctgagcaacacgccgcagagcaccaggctcgccacgcgggagccccggaacagggccaatcgggcaaaggttgaatcggtcatagcgcagtgtccagggcagcatcggtccgcacgccgcgccaggcgttgaagcgatggcgcgcgcggtcgagataaaggtaaaccaccggggtggtgtaaagggtcaggacctggctgaacaccaggccgccgataatggtcaggcccaggggacggcgcatttccgcgccatcgccggcacccagcagcagcggcaaggcgccgaggatggccgccagggtcgtcatcaggatcggccgcaagcgcaacaagcaagcactgcggatcgattcaagcggccccatgcggtcattgcgttccaattgcagcgccaggtcgatcatcaggatcgcgtttttcttcaccaccccgatcaacaggaacaggcccagcagcgagatcaggctgaactcgcctcccgtcaggtagatggcgagcatggcgccgacacccgccgagggtaaggtcgagagaatggtcagcgggtgaatgtagctttcgtacaggatgcccagcaccaagtacaccgccaccagcgcgccaaggatcatgaacggttggcccttctgcgtggccgcgaaggcatcggcggtgccggccatcttggcgatcacatcttccggcaagccgaccttggcgatcgcccgttcgatggcggccgtgccctgctccaccgtcacgccgggcgccatgtcgaaggcgatgttctccgaagcgaactggccttcgtggctgacgcggtcgtcagccaggctgttctcataatgggcaatggtcgacaacggcacccgtgcccccgtggacgtgatcacctgcatctggttgagagtgatcgggtcctgggcgtatttggggttgacctccatcaccacctggtactggttgaggctgtcgtagatggtggaaatctgccgctggctgtaggcgttgttcagtacggccgtgaccatgttcatgtcgatccccaggcgcttggcctggtcgcggtcgacaatcaatgtgacctgcgccgcaccgcgaccttcacgggcgtcgatggcggtgagttccggcaactcgcgcagggccgccaccactttcgggtaccacaggcgcagtgccgccaggtcgccgctttgcaggatgtaggaatactgcgcactggtctggtcgcggctgccaccgaattgcaggtcctggtcggccatcaggaacaaccgcccgcccggcaccagcggcacgtccttgcgcagacgctcgatcaccgcctgggcagagatcttgcgctcgctgatgggtttgaggcgtaccagcattaccgcgttgttggtgccgttgttgccaccaatgaagccggccacgctgagcaccgccgggtccttgagcaccgccttgcggaaggtctccatcttcggctgcatcacgctgaacgacaggccgtcgtcaccgcgtacaaagccgatcaactgcccggtgtcctgttgcggcatgaaggttttcggcaccaccacgtacagcgccacgttcatgccgatggtcagcaacaggctgagcagggtcaggcgccgatggcgtagcacccagtccaggctggtggcgtagccggagaccatgcgatcgttgatcttctggctccagcgctgcaaaccggtcatctgcgttttaacgtggggtttgagccagcgcgcgcagagcatcggggtcagggtcagcgagacaatcagcgacacaatgatcgccgccgacagggtgatggaaaactcgcggaacagattggtgacaatcccgcccatgaacaggatggagaggaacaccgccaccagcgatacgttcatcgacagcaaggtaaagccgacttcctgggcgcccaggtacgccgccttcatcggcggcacgccttcgtcaatgtgccgggagatgttctccagcaccacgatggcatcgtccaccaccaggccggtggccaggatcaacgccatcagcgaaaagttgttcaacgagaacccgtacaggtacatcaccgcgaaggtgcccaccagtgacaccggtaccgccagcgtcgggatcagcgaggcgcggaaattgcccaggaacaggtacaccaccaggatcaccagccccacggcaatcagcaaggtcatctcggcttcatgcaaggtggcggtgatcaccggggagcggtccatggccaggctcagcttgacgctggacggcaacaccgcctgcaacgccggcaactgcgccttgatctgtcgcaccgtctcgatgatgttggcgccggactggcggttgatcaccagcagtaccgccgagtcgttgttgaagaaaccactgttgtagcggtcttccacaccatcgctgatcttggccacatcacccagacgcaaggctgcgccattctggtagcgaatcagcagtggctcgtagtccttggccttttccaactggtcattggcctggatctgccagttgcgctcgctgtcttccagggaacccttgggtcggcgctggttggcgttggcgatggtgttgcgcacatcatcgagggccacgccgtactggtcgagggccttgggttccagttcgatgcgcacggctggcaaggaactgccgccgatctgcacttcgccgacgccgggcacctgggacaggctttgcgacaggatggtcgaggccaggtcgtacagctggcccttctgcagcacgtccgaggtcagcgacagcaccatgatcggcgcctgggacgggttgatcttcttgtaggtcggcatgctgcgcataccgctgggcagcaggttgcgcgaggcgttgatcgccgcttgcacttcccgcgccgcgccgttgatgtcgcggtcggagtcaaacgcgaggatcacccgggtcgagccctggctcgacgaactgctcatggtggtgatgccggcaatcgcgccgaacgagcgctccagcggcgtggccacggtagacgccatcacttcggggctggcgccgggcaagctggccgacaccacgatcaccggaaaatcgatctgcggcagcggcgataccggcagcaggttgaagctgacgccgccgagcaacaggatcgccaggctcagcagcatggtcgcgaccggccggcggatgaaaggtccggacaggttcatgactcaaccggctccaggctttgcggctctttgcgccagcggcggccgaggcgatcgaagtacaggtagatcaccggcgtggtgaacagcgtcaacacctggctcaccagcagcccgccgaccatcaccaggcccagcggttggcgcaattccgcgccggaaccggtggccagcatcaacggcaccgcgccgaacaacgctgccagggtggtcatcaggattggccggaagcgcagcagcgccgcctggtagatcgcagtctgcgggtcgaggccctggttgcgttcggcgtcgagggcgaagtcgatcatcatgatcgcgtttttcttgacgataccgatcaacaaaatgatgccgatgatcgcgatcatgcccaggtcattgccgctgagcagcaacgccagcaacgcccctaccgccgccgatggcaaggtcgagagaatggtgatcgggtgaatgtaactctcgtagagcacaccgagaacgatgtacatggtgaccaccgccgccaggatcagcagcaaggtgctcgacagcgacgcttcgaacgcctgggccgcgccctggaactgggtttgcacgcccaccggcatgccgatgtctttctgggtctggttgatcagctccacgcctttgcccagcgcgacgccgggggccaggttgaacgacatcatcaccgccgggaactggccgatatgcgcaattgccaactgcgcctggcgctgttccacgtgggctaggctggagaggcgcacctggccgccatcggtggttttcacgtggatctggttcagcgcgtccggcccaagggtttcgccggactgggcctgcaacaccacgcggtactggctggcctgggtatagatggtggaaatctgccgctggccgaaggcgtcgtacagcgcatcggtgatggtcgacacgctcacacccagccgcgaggccgcatcacggtcgatcaccaggtacacctgcaagcctttgtcctgcaggtcgctggccacatccgtgagttccggcaactgactgagcgcatgcaccagcttgtcgctccacaacgccagcagttcggcgtccggcgaggacatgctgaactggtactgggtacggctcacacggtcttcgatggtcaggtcctgcaccggctgcatgaacaggcggatgcccaccagcttgtcgatttccggttgcaaacgggtgatcacctgggccgcgctcaggtcacgctggccgtgggccttgaggttgatcagcagtcggccgctgttgagggtggcgttatcgccgtccacaccgatataggacgacaggctttccacggcgggatcggccaggatgatcttggccagttcctgctggcgctggctcatggcggcgaaggaaattgattgcggcgcctcggaaatgccctggatcacgccggtgtcctgcaccgggaagaaccccttgggcaccaccaggtacaggaatacggtgaggcccagggtggcgatagccaccagcagggtcagcggctggtgcttgagcacccactgcaacatgctcccgtaacgcgcaatcaaccaatcgatccaggcgccgctggccttgtagaagcggctttgctcttgctccttgggctcacgcttgagcaagcgcgcgcacatcatcggcgtgagggtcagggacaccaccagggaaatcaggatcgccaccgccagggttatggcgaattcgcggaacaggcgcccgactacgtcagccatgaacagcagcgggatcagcacggcgatcaacgaaagcgtcagggaaatcagggtgaagccgatctgcttggcgcccttgagggcagcggccagcggcgtttcgccttcctcgatatagcgcgaaatgttctccagcatcacgatggcatcgtccaccacaaagccggtggcgatggtcagcgccatcagcgtcaggttgttgatggagaatccggccaagtacatcacgccaaaggtgcccaccagggacagcggcacggcgatggacgggatgatcgtggcactgacccggcgcaggaacaggaacgtcaccatcactaccagggcgatggcgatgagcaattcgtgttgcacatccttgaccgaggcgcggatggtctgggtgcggtcggtgagcaccgtcacgtcgaggccggccggcaggttgtcggtgatgctcggcagcaacgccttgatgcggtccaccacctcgatcacgttggcgcccggttggcgctggatattcagcagcacggcctggttttcgttggcccaggcggcgaggcgttcgttttcggcgccgtcgacgatctgcgccacgtccttgaggcgcagtggcgcgccgttgttgtaggccaggatcagttcggcgtattgcgcgggcgagactagctgatcgttggcatcgagcatcgacacacgggtcggcccgtcgaaattgcccttgggctggttgacgttggatgcagcgatcagcgtgcgcacatcggacaggttcaagccgttggccgccagggcctccgggttgaccttgatgcgcaccgcctggcgctggccgccggcgatgctgaccatgccgacgccgctgatctgcgcgattttctgcgccatgcgcgtatcgaccaagtcattgagcttgggcagcagcatggtcttggaggtgatcgccagggtcagcaccggggtatccgccgggttgaccttgttgtacaccggcggcgccggcaggtccttgggcaacaggttggtggcggcgttgatcgcggcctgcacctgttgctcggcgacgtccatgttgatgtcgaggttgaaacgcagggtcagcaccgacgcgccaccggaactggtggaggccatctgcgtcaggccgggcatctgcccgaactggcgctccaatggcgcggtgaccgcgctggtcatcacgtccgggctggcgccggggtacagggtcatcacccggatcgtcgggtaatccacctggggcaaggccgacaccggcaacaagcggtacgcgatgatgccggccaggacaatggccagcatgctcagcgtggtagctaccgggcgaagaataaacagccgcgacaggttcatgaaccgaccttttgcgccttgccggcggtggcgccggtctcccctttggccgcaggcttgccttgcaggtgttcggtcggggtggtcggcacttcgctgctgtcgttgaccacttcgatctcgctgccatccttgagacggtcggtgccttccagcaccacgcggtcgcccgccttgaggccctctttgatcacggtgttgtcgccatcggtatcgccgaccaccaggggctgcatcttgaccttcttgtcaccgtccagcacgtagacaaaggtgccgctgttgccaaactggatcgccgccgacggcgccagcaccacgttatgcagggtgtcggccagcaggtgcacattgacgaactggttggggaacagcgcctggtccttgttatcgaaacgcgccttgaatttcagggtgccggtggtgacgtcgatctggttgtccaggctctgcagcacgccagtggcctgtttcttcacgtcgccacggtcccaggcctctactggcagtttgttgccggcgtggtagcgggtgagcacggtttccagggtgttttccggcagggtgaaggccacgctgatcggttgcgtctgggtgatgaccgcgaggaaggtggtgtcgttggccgccaccaggttgcccacgtcgacctggcgcaggccaacgcggccgctgatcggcgcacggatcttggtgaattcgaggttgagcttggcgtcatccaccgcgccctggttggtcttgaccgtgccctggtattgcaggaccaacgcttcggcggtgtccagggtctgtttggcgatgctgtcctgggcgtacaggtcgcggtaacgctgcacatcgacctgggcgtttttcagctgggcctggttctgcatcagcgtgccctgggcctggagcaaggcgttctggtagctgcgcgggtcgatctcggcgagcaggtcgccggccttgaccatctggccttcttcaaaggcgatcttcaccagctcgccgcccacccggctacgcacattgatggtattgagcgcggtcaccgtgcccagtgccttgtagtacaccgggaattctcccagcacggccggggccacgcgcaccggcaccgggccggccgagccgccgaaccccgggcgcatcatccccgtcttgccggcatggcccgcaggcttttcggcgccatccttatggctgccgggccagaatttccagcacaggccggcgataaccagcagcacgagcaggccgaacagccagcggcgggatttacggggggaggattgcatggagtgatcaaccattgggcgcgagagcttcttctttgggaggctgaaagataagcactggggcgcatttagaaaagcgcctttaccggctatttaccttgggcttacaacttttaactgctgatcttagtctgcccgctatttcgctaagcagttgaggcacaaataaaaacggcctggactaggccaggccgcaatcatgcatcaagcgtgttactgcaaaacgacagtaacgtaccgaaacagttacttcaaaacagccagggctgcttcgtagttcggctcctggccgatttccgcaaccagttcgctgtgcagcacgttgttgttctcgtccagtaccaccacggcgcgggcagtcaggccctgcagtgggccgtcggcgagggaaacgccgtagtcgacagcgaagtcggcgttgcggaagtccgacaggctcagcacattgtccaggccttcggtgccgcagaaacgcttctgggcaaacggcaggtcagaggaaatgcacagcacgaccgtgttgctcaggtcgttggcctgggcgttgaacttgcgtaccgaggtcgcgcaggtcggggtgtcaacgcttgggaagatgttcagcaccttgcgcttgccggcgaaggtttccagggtcgcttgcgacaggtcggtagcaaccaggctgaactcgggagcggtggagccggttttcggcagttcgccttcaacctggacaggattaccacgaagggtgacttgagccatgaacagaatccttatgctgggtttgatgaaacgaattcgagaggcggaagttaaccacaaagtgcgatggctacctaccgccagacataaattgtcatgccgccggttatggtttaattgcgcgccgatcgccctgcccttcaaggaacctgttgttgatgaatcagcctgccaccaaagtcctggtcattggttatgtctggccggagccgtgttcctcggccgcaggcgggcacatgatgcagattcttcagagctttcttacacaaggttgggacataaccttcagcagccccgcgaccgtcggcgagcacaaggccgatttgcctgcgctgggcatcgccgaatgcgccatcgaactcaataaccgcagtttcgatgattttattcgcgagttggccccggatatcgtgctgttcgaccgtttcatgatggaggagcagttcggctggcgcgtcgaaaaatgctgcccaggcgccctgcgtgtcctggaaacctccgacctgcaaagcttgcgcgatgcccgtcaccaacgcgtcaaggatcacctgaaggcgcatcccgacaccgaggacttcagcgcgttgttctgcccggcacttccggaagagttccgactaatggccgagaccgacctggccaaacgggaaatcgcggcgatttaccgctgcgacatcagcctgatgatctccgacgtggaaatccgcctgctgaccgagcacttcaaggtgccgcccgccctgctccactggtgcccgctgatgctggagcggccgaccgagcccttcgcgccatttgaagaccgcgcccatttcctcagcatcggcaacttccgccacgcccccaactgggatgcggtgctctggatgaaaaacagcctgtggccgctgatccgccagcaactcccgggagcgcaactgcacatttatggcgcctacaccccgcccaaagccacggccttgcataacccggcacaagggtttcatgtgatgaactgggccgaagacgccttgcaagtgatgacggcggcgcgcatctgcctggcaccgttgcggttcggcgccgggatcaagggcaagctggcagatgcaatgctctgcggcacgccaaacgtcaccaccccaatcggcgccgaggccatgggggatgaacagccatggcctggcgcagtagaacagagcgcacctgccctcgcggcggcggcggtggcgttgtatcaagaccgtgaacgctggacccaggcccaggaagacggtcgccaactgctggcccggcggtatgaccaggacatccacggcccggcgctggtggcctgcctggagcagtgccgtcaacacctcgcggcccatcgacgcgataacttcactggcagcatgctgcgccaccacgcccataaaagtacccagtacatgtcgcagtggatcgaggcaaaaaaccgcaacgtataaacatcgacgctggcgaggtcgtgcgcaagggggcattatcctacgcagcaaccacaataaagcggcggcagcatgacccgagcagcgcgcatcaccgacccttcctacgaactgatggacgaccacaacggcctgtccatcatctatcgccaacacggtttcccttgcccgctggtgcgctggcacttccacaaggaatacgagctgcacctgatcgtcgccagctccggcaaggtgtttatcggcgactatatcggcaacttctacccggaaagcctgtttctcaccggccccaacctgccccacaactggatcagccaggtggacgaagacgaggtggtgcccaagcgcgacatgctggtgaatttcaccgatgaactgttcgagcacggcagccacatcttcgccgaactcaaaagcctggcaccactgctggaacgcgcgcagtacggcatcgagtttcgctgcaaaaagaccatcgcccaggccatgaccctgatgcaacgcatcgaggacgcccagggcatggcgcgcctggggcacttctttatcctgctggaagtattgagcgcctgcgaggactaccaactgctgtccggtgtgaccacgccgcaactggccgatgaacacagcatcgaccgcaccaaccgtgcagtggattacatttttgcgcactacgcgcgcgagttgccgcttgaggaagtggcggaatacctggggatgaagccgacttacttctcacgcgtgttcaaacaggctaccgggcgtacgttcatcgaattcgtcaatcgtttgcgtatcagcaaatcctgcgagttgttggccgatggggataaagccgtgacggatgtgtgtttcgagtcgggcttcaacaatatttccaacttcaaccgacgcttccagcagcttaaaggcatgaccccttcccactaccggcgcctggcggtgcagcggctcaccgaacagaacctggcttaatagtttcagccggcttgagcccgagtgcaaaaaagtatcagtgccagtgcgcccaaggatttgtcacaaccccatttcaaggctgtaatcaacgcacactcttcctgacagctcgtgggaagacacaacaacaataactgtccttctgtagccccctgggcgcggaaacggagtgcgcgatgaaattcacagcaaaagttctgcttgcctctacctgcttgactatcagcgccgtcagccttggcgcgcagaccctgaccattgccaccgtcaacaacagcgacatgatccgtatgcaaaagctctcgaaaaccttcgaggccgagcatccggagatcaagctgaactgggtggtgctcgaagagaacgtactgcgtcaacgcctgaccaccgacatcgccacccagggtgggcagttcgatgtattgaccatcggcatgtacgaagctgcactgtggggcgccaagggttggctggagccgatgaaggatctgccggcgtcctacgacctcgacgatgtattcccttcagtgcgtgacggtttgtccgtgaaaggctcgctgtatgccctgccgttctacgccgaaagctcgatcacctattaccgcaccgacctgttcaaggacgccgggctgaccatgcccgagcacccgacctggacccagatcggcgaattcgccagcaaactcaccgacaagaccaaagagcaatacggcctgtgcctgcgcggcaaagccggttggggtgaaaacatggcgctgatcaccaccctggccaacggctacggcgcgcggtggttcgatgagaaatggcaaccggagttcaacggccctgaatggaaggatgcgctgaacttctacgtcgacaacatgaagaaatccggcccgccgggcgcttccagcaacggtttcaatgaaaacctggcgctgttcaacagcggcaagtgcgcgatctgggtggatgccagcgtggccggctcgttcgtcaccgacaagacccagagcaaagtggctgaccatgtcggcttcacctttgcccctcatgagaagaccgacaaaggtacgtcgtggttgtactcctggagcctggccattccaaccagttccaaggccaaggacgccgccaaggtgttcaccagctgggccacctccaaggaatatggcgctttggttgccaagaccgatggcgttgccaacgtaccaccaggcacgcgcaagtcgacctacagcgacgagtacatgaaagccgcaccgtttgccaaggtgacgctggaatcgctgaaagtcgccgacccgaccaagccgacgctcaagccggtgccgtatatcggtatccaattggtgaccattcctgaattccaggcgattgggacccaggtcggcaagtttttctcaggcgcgctgaccggtcagcagacggtggatcaagccttgaccgccgcgcagaccaccaccgagcgtgaaatgaagcgggcgggctaccccaagtaatccagccctacccacagtcaaatgtgggagggggcttgcccccgatagcaatctaacagttgatgaatgtgtgactgacacaccgctatcgggggcaagtcgaatcgtcgcaccgcccctcccacactgatcgcactccgattcttgctctgtaccggtcgtgaataccatgaatacacccgccaaaaaccgcctggccaaccccggctggttcctcgtcagcccctcggtggccttgctgctgctgtggatgatcgtgccgctgggcatgaccctgtacttttcgctgatccgctacaacctgctctaccccggtgaaaaccagtttgtcgggctggagaacttcacgtatttcgtgaccgactcgggcttcctgcccggtgctaccaataccctgttgctggtgggcagcgtgctgctgatcagcgtggtgttcggtgtgttgatcagtgccctgctggaggccagtgagttcttcggccgtggcctggtgcgggtgttgttgatctcgccgttcttcatcatgcccaccgtcggtgcgctgatctggaaaaacctgattttccacccggtgtcggggattcttgccgccgtgtggaagctgttcggtgccgagccggtggactggctggcgcactacccgttgctgtcgatcatcatcatcgtgtcgtggcaatggctgccctttgcaatcctgttgctgatgaccgccatgcagtccctcgaccaggaacaaaaggaagccgcacgcctggacggtgccggcgccatcgcgatcttctggcacctgaccctgcctcacctggcccggccgattgccgtggtggtgatgatcgagacgatcttcctgctctcggtgttcgccgaaatcttcaccaccaccaacggcggccccggctacgcctcgaccaacctcgcctacctgatctacaaccaggcgctggtgcagttcgacgtgggcatggcctcggctggcggcttgattgccgtggtcatcgccaatatcgcggcgatcatcctggtgcggatgatcggcaaaaacctgactgacaagccttgagggccgcgccatgacgcttcaacaatcccgccgcctgcaaagcctgttgctcggcaccctggcctgggccatcgcgatcctgatcttcttcccgatcttctggatggtgctgaccagcttcaagaccgaaatcgacgcgttcgccacgccgccgcagttcatcttcacgccgacgctggagaactacctgcacatcaacgagcgcagcaactacttcagttatgcgtggaactcggtgctgatttccttcagcgccaccgccttgtgcctgctgatctcggtaccggccgcctactccatggcgttctacgaaacccagcgcaccaagggcacgctgctgtggatgctgtcgaccaagatgctgccgccagtgggcgtgctgatgccgatctacctgctggccaagagttttggcctgctggatacacgcatcgcgctgatcatcatctacaccctgatcaacctgccgatcgtggtctggatggtttacacctacttcaaggacatccccaaggacatcctcgaagccgcgcgcctggatggcgcgaccctgtggcaggaaatggtccgcgtactgttgccgattgccaaggggggcctggcctccaccgtgttgctgtcgctgatcctgtgctggaacgaagcgttctggtcgctgaacctgacctcgtccgccgctgcgccgttgaccgcgctgatcgcttcgtactccagccccgaagggctgttctgggccaaattgtccgccgtgtcgaccctggcctgcgcgccgatactgatctttggctggatcagccagaaacagctggtgcgcggcctgtccttcggcgccgttaaataataattcctagcggaggcccatcatggccaacctgaaaatcaagaatctgcaaaaaggcttcgaaggcttttccatcatcaagggcatcgacctggaagtgaacgacaaagaattcgtggtgttcgtcggcccgtcgggctgtggtaaatccaccctgctgcgcctgatcgccggcctcgaagaagtcagcgaaggcaccatcgaactggacgggcgcgacatcaccgaagtgaccccggccaagcgcgacctggcgatggtgttccagacctatgcgctgtacccacacatgagcgtgcgcaagaacatgtcgtttgccctggacctggccggggtcgacaagaagctggtggaaagcaaagtcagcgaagcggcacgcatcctggaactgggcccgctgctggagcgcaagcccaagcaactgtccggcggccaacgccagcgtgtggccattggccgggcgattgtgcgtaacccgaagatcttcctgttcgacgaaccgctgtccaacctcgacgccgcgctgcgcgtgcagatgcgcctggagctggcgcgcctgcataaagagctgcaggcgaccatgatctacgtgacccatgaccaggtcgaagccatgaccctggccgacaaagtggtggtgctgaacagtggccgtatcgagcaggtcggctcgccgctggagctataccaccagccggccaacctgttcgtggcgggctttctcggtacgccgaagatgggcttcctcaagggcacggtcacccgtgtcgaaggccagggctgcgaagtgcaactggacgccggcaccagcatcagcctgccgttgagcagcgccagcctgcgcgtcggcagcgcggtgaccctgggcattcgcccggagcacctggaaatcgccacgcccggccaaaccaccctgaccgtcaccgccgacgtcggcgagcgcctgggcagcgacaccttctgccacgtcatcaccgccaatggcgagccgctgaccatgcggatccgtggcgacatggccagccagtacggcgagacgctgcacctgtacctggacccggcgcactgccatctgttcgacaccgatggcgtggccgtggcccgcccactgcgcgctgccgcctgatttcgcgagattgagctgatgaaactgaataaacacaacctcacccagctggcatcgcaagtgaagctgcccagctatgcgattgccagcaccacccagggcatcgcccatatcggcgtcggcggtttccaccgtgcgcaccaggcgtattacaccgatgcgctgatgaacaccggcgaagggttggactggagcatctgcggcgtcggcctacgcgccgaggaccgcaaggcccgcgacgacctggctggccaggactacctgttcaccctgtacgaactgggcgataccgacgacaccgaagtgcgggtgatcggctcgatcagcgccatgctgctggccgaagacggcgcccaggcgctgatcgacaaactggccgacccggccatccgcatcgtgtcgctgaccatcactgagggcggctactgcatcgacgacagcaacggcgagttcatggcccacttgccgcagatccagcacgacctggcgcagccgagcgcaccgaaaaccgtgttcggctttatctgcgccgcgttgacccagcgccgcgccgccggcaccccggcgtttaccgtgatgtcctgcgataacctgccgcacaacggcgccgtgacgcgcaaggcgctgctggccttcgccgccctgcacaacgccgagttgcacgactggatcaaggccaatgtgagctttcccaacgccatggtcgaccgcatcacgccgatgaccagcaccgcccaccgcctgcaattgcacgacgagcacggcatcgacgatgcctggccggtggtgtgcgaaccctttgtgcagtgggtgctggaagacaaattcgtcaacggtcgcccggcctgggaaaaggtcggcgtgcagttcaccgatgacgttacgccctatgaagagatgaagatcggcctgctcaacggcagccacctggcgttgacctacctggggtttctcaagggttatcggtttgtgcacgagaccatgaatgacccgctgttcgtggcctacatgcgcgcctacatggacctggacgtcacgccgaacctggcgccggtgccgggcatcgacctgacgcaatacaagcagacattggtcgaccgcttctccaaccaggcgattgccgatcaattggaacgcgtgtgttccgatggctcgtcgaagtttcccaagttcaccgtaccgaccatcaatcgcttgattgccgatgggcgcgagaccgagcgtgcggcgctggtggtggccgcttgggcgctttacctcaagggcgtggatgagaatggcgtgagctacaagatcccggatccgcgcgccgagttctgccaggggctggtgagtgaggatgcattgatcagcaaacgcctgctgggggtggaggagatttttggcacggctattcccaagtcggctgagtttgtggcagcgttcgagcggtgttatgtgagcttgcgcgataacggcgtgaccaaaacactgcagcaactcctgaagaaaccgacctaaacatgtgggagggggcttgcccccgatgagggagtgtcagttgatgcatctttagctgacccagcgctatcgggggcaagccccctcccacattggaatgcatggccaactcgaacaataaactgctgagcacaccctcatgacccagcaaaacctgtttctcggcatcgactgcggcacccaaggcaccaaggccatcgtcctcgacgcctccagcggcaaggtactcggcctcggcgctgcggcgcacaccctgatcagcggcgccaacggccgccgcgaacagcacacccaggaatggctggacgctttcaccgaagccacccaccgcgccctgcaacaggccggtgtggacggccaggacatcctcggtatcggcgtgtccgggcagcaacatggcttggtgctgctggatgaacacggtgaggtgttgcgcccggccaagttgtggtgcgacaccgaaaccacgcctgaaaacgagcgcctgctggccgatctaggcggtgagaacgtctcgctggaacgcctcggcgtggcgattgcaccgggctacaccgtgtcgaaactgctgtggacccgcgaacagcacccggacctgtttgcgcgcattgcgcatatcctgttgccccacgactacctcaactactggctcaccggccgtgccgtcgccgagtatggcgatgcgtcgggcaccggctacttcaatgtgcgcagccgtgaatgggatgtggacctgctcaagcacatcgaccccagcggccgccttgaagcggcgctgccagcgttgatcgaggcgaatcaaagcgtcggcacgatcctgccggccatcgccgaacgcttgggcatcaaccccaatgccatcgtttccagcggcggcggcgacaatatgatgggcgccatcggcaccggtaatatcgcgcctggcgtgatcaccatgagcctggggtcctcgggcacggtgtatgcgtttgccgaccaacccaacgtcagcccgcaggcttcggtcgctaccttctgctcatccagcggcggctggttgccattgatctgcaccatgaacctgaccaatgccaccggggtggtccgcgagctgttcgacctcgacctggccgcgttcaacgccctggtcgagcaatctccaattggcgccgacggtgtaagcatgctgccgttcctcaacggtgaacgcgtacccgccctgccccacgccaccggcagcctgcacggcctgaccatgaccaacctgacccgcgccaacctgtgccgcgccgtggtcgagggcaccaccttcggcctgcgctacggcctcgacctgctgcgcgagaccggcctgcaaagccagagcatccgcttgatcggcggcggttcgaaaagcccggtatggcgccagatggtcgccgacatcatgaacaccgaagtgatctgcaccgaacaaagcgaagccgccgccctgggcgcggcgatccaggcggcgtggtgccagtccggcgaagcgctggccagcctttgcgacaaatgcgtaagcgtcgaccccgccagccggaccctgccggtggcggccagcgtgggcgcctaccagcaggcttacgagcgctatcaacaactcgtggcaaccctttaagagcgaacgactatgtatctggtgtgtggtgaagcgctgtttgatttcttcagcgaggaagatgccagcgggcaggcctccaaggtcaactacaaggcgattgccggcggttcgccgttcaacgtggcggtaggcctgcgccgcctgggtatcgaggccgggttgttcggcggcttgtccaccgacttccttggccgccgcttattgcaggtgctcaaggatgaaggcgtgagcgagcagttcctggtggagttcgccgcaccgaccaccctgtcgatggtcgccgtgggcgccgatggttcaccgcagtacaacttccgtggcgaaggctgcgccgaccggctgctggaaatcgcccatctacctgccctgggcgatgatattcgcggcctgcacatcggttcgttctcgctggtagtgcaaccgatcggcgacacgctgctgaacctggtcaagcgcgaaagcggcaagcgcctgatcagcctcgaccccaacgtgcgtctcaacccgcagccggatatccaactgtggcgcgaccgcgtggccgaactggtcaagcatgccgacctgatcaaggtcagcgacgaagacctgcatttgctctacccggaccaatcgccggaaagcgtgctgcagggctggctgcaacaccgttgccaattggtgttcctcacccgtggcggtgacggcgccagcgtgttcagccgccagcacggcaattggtctgcgccggcggtcaaggtggtgatggccgatacggtgggtgccggcgataccttccaggccgcgctgatcgcctggctgaccgagcagcagctggattcggtggacggcctgcaacggctgacccttgcacagatcgacgccatgctcggctttgcgatccgcgccgcggcgctgacctgcaccaagaccggcccggacctgccctaccgccagcagcttggatgaagattttgtcagccaactaaacattaatcgatggttaatcccgcaagtcgacagtgaagtggtacccacttgcggagcaacaccatgaaactgcgcaccttaatgctcggcgccagcctggcgctggcagccgtgtcaggcctggcccaggccgacgatcaagtcgccactgtcaaacccgtgccctaccactacggcctgccgatgaacattgacaaggtcctggccatgaacgaaaccccgaccgatgaatgcaaagtcatcaaggcggatatcaagtttttggacaaggccggcaaagtcgaagacgtgagctatcggaagatgtccgacgcctgcgacttccagaactgactggacagcactgggcctggcaatcaccaggcccacggttcaacattcaagtattcagtaagcccgtcctcctgcacgttgcaggataggggtatgggcgtgcttgagatcttcacgtaacccggtgatcaagttgcaaatggcccgactgctgtcgagtttatcggcgttgatgcctttgacttccaaatccacccggtcacggtcatggtcgtcgtagaccttgatcgtcagcgaagcatcttcggctttggtgcattcgcaccgtttgggcaggaaacttccttcaataatgctgcgaagttctaattccgaaagcatggtcaacctctccttttctgagactgccaacagattgttattaaacccacgggcgctcgcccgctgcgtcttgccgaccctggaagacgcttgtaacacccaagcctactcggcaaaatcggccatcgttgtaacctttcctcataagcgatgggccgggttatataagtaaagcagcgttgtttaaatcgtcgtcgattggctgcgattaaacgtttaaccctgaacttgcgctttgcgccgcaactctttcagcaacatgtcgcaaactatcgaagttgatattcgcccccgaattgaccgcgaccagggtctgcccctgtacgcctctagttgccacgtacttgcgcacacccgccaccgccaatgcgccagaaggctcggtgatagaacgggtatcgtcatagatcaacttgatggcgctgcacaattcgtcgttgctgacggtgatgacttcatccacccaatggcggcagatttcaaacccgtaggcgccgatctgcgccaccgccgtaccgtcggcaaacccgtcgacactgggcagcaccacccgctcccccgcttgcagcgccgccaacaggcagctggagccttcgggttcgacgccgatgatgcgcacctcgggacgcaggtatttgacataggcggcgatcccggcgatcaggccaccaccgcccacgggcacgaagatcgcgtccaacgcgccctgttgttgacgcaggatctccatggccacggtgccctggccggcaattacatccgggtcatcgaagggcgacacgaaggtggcgcgggatgactcggccagttgcaacgcatgggccagggcaaaggggaaactctgcccatgcaacaccgcttcagcaccgcgagagcgcacgccgagtaccttgagttccggggtgctggcgggcatcacgatgcgcgccttgatccccagctcccgcgccgccagcgccacgccttgtgcgtggttgcccgccgaggccgtgaccacgccccgggccttttgcgcgtcgctcaactgcatcagcttgttgtaggcgccgcggatcttgaaagaaaaggtcggttgcaggtcttcacgcttgagcagcacctggttgcccagcaaggccgatagcgcgggcgcgacctgcaacggcgtgcgcaccgccaggtcgtagaccggggcggcgaggatcttcttcacatactgttcaagcaagcccgtgtcggcggtctcggggcgggtactcatggctgtctcctggctttttgtaaagggcccgggagacggaaaaacaaaacccgcctcaagggcgggtttgggtagagccgtgcgctatcccgccaaatgaggaatggcggtaataatgcttggctggctgcgaaaggtttgaaaggtcatgtcacgaaactaaccggcggcccgcgcccaagtcaatggccttacgccatttagcggccgggggtttacgccctatatacgaaacatatacgctttgtatatcaacccagcacagtgaacaccatgggcatcgtcaagatcaccgaccaactgcacgaacaactgcgcctggccagcgccgcgatggaccgctccatcaacgcccaggccgaattctggatcaagatcggcctgctcgccgagctcaacccccagctgccctacaacgagttgatcaacaaactgttgctggacaaacctgacctgatccgggggcgcagttgatgatcaagactgccgcacaactggccgtgatgcgtgagtccgggcgcctgctggcccaggtcttcagcatgctcgatgcgttcgtcgccgccggccgctccaccctggagctggacgccgccgtcgaagccttcatccgcaatgacctcaaggcccgcccggcgagcctgggccagtacgactaccccttctgcatcaacacctcgatcaatgaggtggtgtgccatggcatgcccagcgccaaggagatcctcaaggacggcgacatcatcaacatcgacatcaccctggaaaaaggcggatttatcgccgactccagcaagatgtacatgatcggcagcgtcgcgcccaaggcccggcgcctggtggagcagacctttgaagccatgtgggccggtatccgccaggtcaagcccggcgcgcgcctgggggatatcggccatgcgatccagagccatgcgcaggccaacggctatagcgtggtgcgtgagtattgcggccacgggattgggcgcgagatgcacgaagaaccgcaggtcctgcacttcggccgccccggtaccgggctggtattgcgcgaaggcatggtgttcaccgtcgagccgatgctcaaccagggcagctcgaaagtgcgcagcttgaaggatgggtggacggtggtgaccaaggacaacagcctgtccgcgcagtgggagcatacggtggcggtgacggcggacggctttgaggtcctgacgttgcaaccctccccctgacgccagcgcctacaatttgatgcgcgtgaggcccaggaccatcaacccaccgcccactcccattgccgccaagaacagtggatacgacacccaccacggcgtccccgccgtcatcatgctgaactccgacatgccgccgatactcgcaatcaggttgagcggcaggaataccacgttgatcagcgtgagcttgcgcaacaggttgttcatgctgttgttcatcaggttgccgcgcgcgtcgatcagcccggaaaacacattggaatagatctccgcctgtttgtagcactggtggttctcgatgaccaggtcatcgatcaagccaatgatctcagcgctgaaatgctccttctctgcgtggttgcgcagccgcgacaacaccgcgccgttgctgtgcagcgcgttgatgtaatagatcaggctttcgctgaggctgaacatctgcatcaggtggtggttgctcatggacgcattgaactgctgctgcagctcgcgggcgaccagcttgatcaccttgagatgaccgaggtaatggtggatgttgttgagcagcaggtcgagcagcacatccagcggcgtgtgcagcggacggcgcttgcccaggccggtcagcggggtttcgtcggtggcgatcaccagcaggcggctgggggaaaacagcaggccgcaggacgacacttcgaacactaggttgccgccgccggagtagttctcggggcgtttccagatcaggaacagattgtcggggtgaaactcgatacgcgagacttcatccgggtccagggccgaggccagggcgtgttcatccagtttgtgatggtcgcgcagccacccacgttcggccaggtcagggttgttgaacagcatgatcggggctgcgtcactctccccgccctgcagcttgccatcgatcagctcgaaacgctggatcatcgccgggtcaccagacctggccctgacgcttcaactccaggcgccgcacgaactcctccagcaccaggccatacaggtcgtcctgcaagtaggcgtcctcgatgcccgcatccaggttcgggttgtcgttgacctctatgaccaccaccttgtcaccggactgcttgaggtcgacgccgtagaggccatcgccgatcaggttggcggtcttcactgccaactcgaccaccgccctgggcgcttcatgcaccgccagggtgcggcattcgccgttgatggcctggccgatggccttgtggttgtagatctgccaatggcccttggacatgaagtactggcaggcgaagatcggcttgcggttgagcacgccgatgcgccagtcgtattcggtgtagaagaattcctgggccagcaacagcactgaatgctcgaacaactcggcggtggccttgagcaaggcttcctggctttcaaccttgatcacgccacgggaaaagcaaccgtcagggatcttcagcaccagcgggaagcccaggcgctcgccgacccgctcgaagtcttccggtcgctccttgtacagaatttcggtggcgggcatgcccagttggtggctgttgagcaagtcggtgaggtagaccttgttggtacagcgcaggatcgacgccgggtcgtccatcaccaccaggccttcgctttcggctttcttggcgaagcggtaggtgtggttgtcgacgctggtggtctcgcggatcagcaaggcgtcgtactcggccaggcgcgaatagtccttgcgctcgatcaactccacatcgatgcccaggcccctgcccacgcggatgaaattgtccaacgccttggcattcgacggcggcaattgctcctggggatcgtgcaggatggccaggtcataacgggccaggcgacgtgagcgcggctggcgccatatcttgcggctgaagttgtccagcgcatgggcgaattgatcttcctggtcatcgcgcaacttgtgcaatacaccggacttgatcccttcgatatgccagccgttactccttttgaaatcaactaacaggatgggacacgggaacgcttcaaataactgacgggccaggtcctgcaacggctctatattggtccggccaaaatacagtgtcagggtaaagccttcggtattgctgtaaagatgatgactcaaggctttatcgagggttttatccaggtcatccagggccaggccgtacagcgacttcttggtcagttcgctgatggtgcgcaccgacggaatcaccttgtgcccacgggcttcggccagcagcgagcagtagtaaccgtgccccaggtacttgtagctgcggcacaggttgatcacctgcacccgcttgccggtctcggtttcccgggtctgttccaggtattcctgggcggtgacgatgtcttcgctggggaagtaggaggcccaatcttccttgcgctcgacaataatcacgacttgacgggttcctttgagtgcggcagaaaaataacctttatcagttattgtcgtcgcgactgtttgctccgatacttcacgccaatgaccttgtaccgccgacataatagttgatccgctttagagaactcgaccttttctattaagcacgatcatttagagaagtcccgtttcgttacacaacttttacggcggtcatatggctctttgctttcgcgttgcaacctccaacgatgtgtctgaactggtggcactggaacagcgctgtttcagcagcgaccggctgtcatcgcgcagtttccagtggatggtcagccgcgcccacggccagttgctggtggcggaaaatgaccggcagttactcggctatgcgctggtgttatttcgtcggggcgcctgctcggcgcgcctgtattcgattgccattgccgagcatgcacgcggcattggcttgggcaagcagttgctgaacgacgtggaagctatcgcagtggcacagggctatacctgcatacgtctggaagtacgcaccgacaaccccggcgccctcaacctctatgagcgcaacggttatcggcgctttgccctgatcaacgactactacgaagaccacactcccgcccttcgcctggaaaaacacctgtagcaagcccgctcactacttgcacggatcaagcttgcacggatcaagccacctgtttgattgccgccttggcttccagctcacgcaccagcggcaacacgcgcttgccgaagtattcgacttcttcctggaagtgcaggaagcccgcgagcaccaggtccacccccactgccttgagcgcgacgatgcgctcggcaatctgctgcggcgtgccgatcaggttggtcttgaagccatcgttgtactgcaccaggtcctcgaagctggacttggcccagttgccctcgccctccggcgacgccttgccggcctgtttcgctgcatcaccgaaggcattcaccgcttccgggtcggccttgtcgatgatctcggccagcacggcgcgggcttcttcctcggtgtcgcgggcgatcacgaaggcgttgacgccgactttgaccgagtggttattggccgccgccttggcgcggatgtcatcgacctgggccttgatgccttccggggtgttgccgttggtgaagtaccaatccgacactcgcgcggccatgtcccgcgccgcccgcgagctgccgccctggaacacttccggctggcccagtggcttgggcttgagggtgtaattgttgaaccggtagaagtcgcccttgaaggtgaagtcatcctgggtccagatgcccttgagggcgcggatgaactcttcggaacgacgatagcgctcatcgtgctccagccagtgttcgccaatggcctggaactcgcccttgaaccaaccgctgacgatattcaccgcgatacggccatgggtgagctggtcgatggtcgccaattgcttggccgccagcgccggttgccacgggccgggcaggatcgcggcgatcaccttgagcgtggtggtcgcggccagcaacgcgtggctgaacgccacggattcgtgctggttctcggcgccgtagccggcggtgaaacggatctgggtcaggccgtactcgaagcctgcagcctcggccagttgcgccagcttgcggttgtaatcgatgccccagtgggtgcgttgttcgattttgctgaccaccagcccaccgctgacgttgggcacccagtaggcaaatttcacggcgtgttgagtcatcggacggtacctcgtacaaaagggatgtacgagggcttgagcagcaagcgtgccaggctggggaaacgcccagaccaggcggcttgggcctgatacccggcaccatcgccagtgtgttggattgcgtcggtttgtcgatccgctgttgccagggcaacagtaactcgacgtttgtccccgtaaatacgcaccccggaacccggcacggactgtgcaatcccctctgcatcgatcactgcccaggaacctcgccatgaccgaacatcacgtcatcaacccgctgtccatcggcgtcgactaccccacgctggcggcacgtttccgcccgatcttccagcgcatcgccgaaggtgccgtagcgcgcgaacacaatcgcaccctgccccatgagccgatccagtggctcaaagaggcagggtttggcgccgtccgcgtgccggtggaatatggcggcggtggtgcttcattgccgcagttgttcgaactgctgatcgaactggccgaagccgactccaacgtgccccaggccctgcgcgggcacttcgcctttgccgaagaccgcctgaatgcaccgtccggcgccggccgcgacctgtggttcaagcgtttcgtggacggcgatatcgtcggctgtgcctggaccgaaatcggcaacgtggccattggcgacgtggtcacccaggtcagccccgacggcgaccactggaagctcaacggagagaagttctacagcactggcagcatcttcgccgactggatcgacgtgtacgcccaacgcagcgacaccggtggcgacgtgatcgccgcaacccgcgcccgtcagcctggcgtggagcacagtgacgactgggatggctttggccagcgcaccaccggcagcggcacgtcgcgctttagcgatgcggtggtggaggcggacaacgtgatcgactttgccacgcgcttcaaataccagaccgcgttctaccagttggtactgctggccaccttggcgggtatcggccgtgcggcactgcgcgatgtggcgcaccaagtgcgcagccgcaagcgcatctacagccatggcaatgcggcgcatgtcagccaggatgcgcagattcaacaggtggtgggtgaagtggcggcgctggtgtatgccgccgaggcgagtgcgctgaaggcgacgttgccggcgcaacgggcgtatgtggcgcggtttgggggggatgaggcggtggagcgcgaagcgaacgtggcggccgagattgagtcggctaccgcgcaggtggtggtgtcggggttgatccagcgggcgaccagtgagttgttcaatgcgttgggggcttcggatgtgcgccagggtaaggcgctggaccggcattggcggaatgcgcggacggtgtcgtcgcataatccggtgatttacaaggcgcggattgtgggggattgggtggtcaatggggctgagccgccgtttgtttggcagattgggaatgggcctggcgtcgtgggttgaggttttttatagggggcatatccgttatttgggtaacggctacttatggttccgctcttacagcggctcacttttgaaagagcgcaaaagtaagcaaaacgctcttgccccaacactcggcacctcgcccaggctcggtgccgagtgttggggcgaagcgtttttggttacttttggcgctcgctcttccaaaagtgacccgccgtaagggcggaaccaatagccgccgttacctaaataacggatatacccccaatcagaaagccagtttataaccaatggccatgagcataaccgccaaacaaggccgcaacaccccgtccggcagcttccccgtcatatgactaccaacatagatccccggcaacgaccccatcaacaaaaacccgagcagatgccaatccatattccccatgctggcatgccccaaccccgccaccagggtcagcggcaccgcatgcgcgatctcagtccccaccagccgccgcgtagccaggaacggatacagaataaacaacgcgaccgtccccagcgctcccgcgccaatggacgtcagcgccaccatggtaccgaggatcgcccccgtcaccaccgtcagcgcattcagattgcgcgggctcatgtgatagctatcacccgcatgccgctgggcaaacgccaacaggcggttcttgaacagaatcgccaacgcggtcagcagcaacaccacaccaagcgcctgcttgatcaccgcattcatcgcgctgggatcggtgtgcaggctggccaggaaccacagcgtcagcaacaccgcaggcacgctgccaagggtcagccagccggtgatggtccagtcgatgttcttgttcttgccgtgcaccagcaccccacccgacttggtgatggcggcgtacagcaggtcagtgcctaccgcggtggccgggttgatgccgaaccacaacaggattggcgtcatcaacgaaccaccgcccacaccggtcatgcccacgataaaaccaacgatcaggccggcaaccacgaaaccaaaattacccacatccattacagctacctgcggccttataaatttctggccgcaggatagcgatttttcttataacgacttataccaatatgatctgactttatgccttttagaccagtcgatgacagacgtaagcctgggtctgatacgggaaggccacggtgtcgcgccctttcaatgcaggatgggtgtcgaccagcgcctgcaattgcgcggtgacgcgggccttgggctcatcggccaacgcggcaataaagctcacggagaggaaacgatccatgatcacctcctgagggctgccaacatggctgtaggggaaacaggtcacttcgggttgggaaaaatacttgccgctgaaggcatcacgccagcggccggtatgaaagcgcggcgtatcaccctcgtacggggtaatgatgtcggtgatcgcggcgacccaatccaccgattcatcccgcacattccacaccaggccaaggcggccgtcaggcttgagcacgcgatggatttccgccagggccgcctcggtggaaaaccagtggaacgcctgggcgcacaccactgcatcggcgctggcggctggcaaggggatggattcagcggtgccattgagcaggcgcacatccggcagcagtttggtcaactgcgcgcccatcgccgccaccggctcgaccgcgatcagggtcggtgccagggtgctgagcaaacgggtgaacttgccggtgccggcgcccaggtcaatcacgctggactgcgcgctgatgcgcaatgtgtcggccagccagccggtgagttgccgtggataatccggccgcccctgggcgtaggtaacggcctgggtagagaaaccttgttgagcagacgtgtgcacaccagtcattgccaatctctcctcgggtaaaacggggacacagtgtgcgccctctgaggtttattttctaatcgctgcatccaatcgtgctcgccgtgggtagtcctttcagtcaccccgctgttttactgaaatggagaagtacccatgaacgctaaagcactgttctgcctcaccgccctgctcgccgccgcgccggccgcctttgcaacccaggccgacttgcccgacagcatcaaggtgccggacggccacaaagtggcgttggaaaccaccggcgtcggcgaaatcacctacgagtgccgtgacaaagccaacgctgccggccagaccgagtggacgtttgtcgggcccaaggcggtattgaatgaccgcagcggcaaacaagtcggcacctacttcggtccgcccgccacctggcaggccaaggacggttcgaaaatcaccggcacccaattggccgtggcgccgtccggcgcgggcaacctgccgtatcaactggtcaaggccaacccagccgaaggcaagggtgcgatgagcggcgtgagttacatccaacgcgtcgcgctcaagggtggcgtggcgccgagcagcgcgtgcaccgcggccaacaagggcaagcaggaagtggtgaagtaccaggcggattacatcttctgggcggccaactgagcaaagtcggctacgctgcccccaatactgatcgttggggggagcaccacgtgtttgattacgacgcctgcctgcaggcctgcgcgcgtggtgatcagcgtgccttgcgccagctctatgagcaggacagcagccgcttgctcggcgtagcgctgcgcatcgtccgggacaaggccctggccgaagacatcgtgcatgacgcgttcatcaagatctggcgtggcgccggcagtttcgaccccagccgcggttcggcccgtggctgggtgttcagcgtgacccggcacttggcgctcaatgtggtgcgcaatcactaccgcgaagtgccgctggacgatgaacacgagcaggtcgcagccaccgacacctttgaattcaccgcacgctccgggcaagtccacacctgcctggagcagctcgacccggcccgtcgcacgtgcatcctgcatgcctatgtcgacggtttttcccacagcgaaatcgcccggaaactggacaccccgctggggaccgtcaaagcctggatcaaacgtagcctcgccgcgctgcgggagtgcatggcatgagcaaccctctggacgaactggccggcgaatatgtactgggcaccctgcccggcgaacagcgcgccgaagtggagcaacgactcaagcacgacgccgagctgcgcgccgcagtcgacgcctgggagcagcgtctgttgccgttgaccgccttggcggagcccgtgccgccctccgctgaattgtggcgacgcatcgagcgccacactgccagcgcccacaccccctggtggaacctgctggccgtatggcgcggcctggccggtgccgggctggtcaccacgctggccctggccacgctgttgctgacgcgtccgcccgtcctggaaccccgctttgtggtggtgctggtcgcgccgcaaagccaagcaccgggctgggtgattcaggccagcaatgaccagcagattcagttgatccccttgggcgtgatggaagtgccagccgacaaggccttgcagttctggaccaagggcgatgggtggcaggggccggtgtcgttggggctggtcaagcccggccagacactgtcggtgccgctggacaagctgccaccgttgacgcagaaccagctgttcgagctgaccctggaagacccacggggctcgccgaccggcaagcccaccggaccaatccaggcgatcggccgcgccgtcaaggtgctttgatcaagcgacgttgggcaaccacacgcggaaccgcgcaccgcccaacggtgacgccagcgcggtcaaggtgccgccctgggcttccagggcgcgccggctgatggccaggccgaggccgaaaccgccagtggcgcgatcacggctgcgatccaggcggtagaacggctcgaagatgcgctcacgctggtcgagcgggatgccgatgccgtcatcgtccacccagatttcacagcccttggcgcagacgttcacgccgacctgaatgcgtttgtcgcagtaacgcgtggcattgcgcagcaggttctgcaaggcgcgggcggtgaggcgcgggtcgaggctgaagcgctccacggcgcagtcgagcgcgacatcgatgacgatctcggggttttccagttcgtcgtcgacgctgcccagtacgctgtcgataaactcatcaagcaccacctcgacccgctccggcagttgcgccgggttttgcaggcggctgtaggacagtagctccagcaccagctcatccagctcgcgaatatgcgccaccaggccatgcaggcgttcacgactggcctcgggcaaatcttcggacagcgccagcgccaggccgaaatccaggcgcgtgagcggcgtgcgcagttcatgggaaacggcgttgagcaaatcgcgctgctggttgagcaggtgctcgatgtcgtcggccatggtgtcgaacaccgccgccaggctgccgatgctggagctggctggcagctgtgtgcgttcggccaggttgccccggcccagttgtccggcggtgcttttcaggcgttccaggtcgcgccaatgcgggcgcagccataccagcaggcaggccagtaacgcggcgacgatcagcacgttgatcgcccaatacagcacgttcatgtccatcgggtcgggcggtatggtcagcttgaccacgaattgctcattgatcggcgagctgatctgctccatccagccccactcgcccaggcgcaccaccgacttgccctgctccagcaactgttcttctgccggggtgtagctggcgtcctggcgcagcaataattgcactttcagcggcgcaaaatcgcggcccagttgctcggtcacctgtgaccaacgctccaccggtgcccgctggtattgcttgacgatcagcttttgctggccgcgggtctgctcgatgttgtagttcatgtagcggtgttcgaacagctggatcaccaacgaagggatcagatagatcgccaggctgtaggtaacaatggtgatcaggtagaggcgtagcaatacacgaaacatggctcagcattcccactcggaacggctgaacaggtagcccttgccccacaccgtcttgatcttgcgcgcctcgccggcgttgtcgtcgaacttgcggcgcagcttagagatggccacatccaccgaccggtcggtgccgttgaactcgatgccgcgcaggcgttgcaggatctggtcgcggctgagcacttcaccggcatgccgcgccagcaccaccagcaggttatattcgccgctggacaactccaccgcctggtcgcgccaggtcacggtgcgctcggacaggtcgatgcacaggttgcccatgatgatctggtcgttggccacctggggctcggaaagactgctgcggcgcaataacgtacgcacccgcgccagcagcacacgcggctcgcagggcttggtcacgtagtcgtcggcgcccatttccaggcccagcacctggtcgtggctgtcatcgcgggcggtgagcatcaggatcggcaggcccgccgagtcggcacgcagcaggcggcacacctgcaggccgtcgaggccgggcagcatcaggtcgaggatcaccaggtccggtgggttcaggcgtgcgcgttcacggacatggtcgccacggctgagcacgctgacgtggtagccattgcgttccaggtagctggcaatcagctcggaaagtgcggcgtcgtcttccaccaggaggatgttgggcataaaggtgtttccagaaaatacagttgttggtcgtacacaaatcccacgtgggagggggcttgcccccgatagcggtggctcagtgaagcatatttcgactgatacaccgctatcgggggcaagccccctcccacatggcatctccagtgtttgcaggattgtgcaaggatatacgcccccggcgccccgcgcgccgcaccttacatttcttcacacacgagctacacagcttcacagcaccacggcgcaggtgaccttaggatgcgccagtcaatattgggataagagcatgtcgaagaatctgtttgcgccattttgcctgctggccctcaccctggcccttagcgcatgtggtgactctgccgccgaagcgccggaaatgcccctggccaaagtgcgcatcgaaaccctggaagccaagccgctgtcgatcagcagcgaactgagcgggcgcattgccgcgccgcgcatcgccgaagtgcgcgcacgggtcgccggtgtggtgatgcaacgggtgttcaaggaaggccatgacgtgaaacagggcgacgtgctgtttcgcatcgaccccgcgccgttcaaggccgacctcgacagcgcccaggccaacctgagcaaggccgaggcggatgccttcaaggcgcgcctgcaggagcagcgctacagccaattggtggaaggcaacgccatcagcggccaggactacgacaacgcccgcgccgccgtgcgccagaccaacgccgaagtcgccgccaacaaggccgccgtggagcgcgcccgcttgaacctgggctatgccactgtgaccgcgccgatttccgggcgcatcggtcgtgcgctggtaacggaaggcgcgctggtcggccagaacgaggccacgccgctggcgatcatccagcaactggacccgatccacgccgacctgacccagtccaaccgcgaactcaacgacctgcgccgcgccttccgcgctggcagccttaagcaggttggccaggaccaggccaaggccacgctgatcgaggatgacggcagcctgtacccactgccaggcaagttgctgttcgccgagatcagcgtcgaccccggcaccgggcagatcatcctgcgcagcgagttccccaacccggacctcgacctgctgcccggcagctttgtgcgggtgcgcctggagcaagccgtcgacaagcaaggcatcagcgtgccgcaacgcgccatcacccgtgacagcgccggtatcccgatggtcttgctgctggacgccgagcagaccgtgagccagcagccggtggagttgggcgcggtggtcaacgatcgctggatcgtcagcagcggcctcaaggccggtgaccgcatcatcgtcgaaggcctgcaacacgcgcgccccggtgaaaaagttgaagtggacgacagcccgctcgtaaaggaataacccgccatgccgcagttctttattgaccgcccgatcttcgcctgggtggtcgccctgtttatcctgctggccggcttgctggccatcccgcagttgccggtggcgcagtaccccaacgttgcgccgccaaaagtcgaaatctacgcggtgtaccctggcgcttcggcccagaccctggaccaaagcgtggtcagcctgatcgagcaggagctcaacggtgccgatcacctgctgtatttcgaatcccagagcagcctgggttcggccaccatcaccgccaccttccaaccgggcaccaacccggaaatggcccaggtggatgtgcagaaccgcctcaaggctgtcgagccgcgcctgccgcaagcggtgacccagcaaggcttgcaggtggagaaggtctccgccggcttcctgttgctggtgacccttacgtccaacgacggcaagctcgatgacgtggcgctcagcgactacctggcgcgcaacgtgatgaacgagctcaagcgcctggatggcgtgggcaaggcccagctgtacggtgccgagcgtgccatgcggatctggatcgacccgcagaagctgatcggcttcaacctcacgccagccgacgtcaacgccgcgatcagcgcgcagaacgcccaggtctcggcgggtagcatcggtgacctgccgggcacgaatacccaggaaatcaccgccgcgatcctggtcaagggccagttgtcgacgccggctgaattcgccgacattgtgctcaaggccaacccggacggctccaccgtgcgcatcggcgatgtggcacgggtggaagtcggcagccaggaataccagttctccacacgcctgaacggcaagccctccaccgcggtcagcgtgcagttgtcgcccggcgccaatgcgctgagcaccgcgacgctggtgcgggcgaagatggacgagctgtcgcgctatttcccggccaatgtggaatacaagattccgtacgacacctcgccgttcgtcaaggtttcgatcaccaaggtggtctacaccctgcttgaagccatggcgctggtgttcgcggtgatgttcctgttcctgcagaacgtgcgctacaccttgatcccgacgctggtggtgccgattgcgctgatgggcaccttcgccaccatgttgctgctgggcttttcgatcaacgtgctgaccatgttcggcatggtactggccatcggtatcctggtggacgacgcgattgtggtggtggagaacgtcgagcggatcatggccaccgagggcctgtcgcccaaggaggcgactaaaaaggccatgggccagatcaccggcgccatcatcggcatcaccctggtgctggtggcggtgtttctgccgatggcgttcatggccggttcggtgggggtgatctaccagcaattctcgctgtcgatggccacctcgatcctgttctcggcgttcctcgccctgaccttgaccccggccctgtgcgccaccttgctcaagccgatcccccagggagagcaccatgccaagggcggtttctttggctggttcaaccggcgtttcgatcagttcaccgaccgctatgaaggctgggtggcctatgccctcaagcgcagcggccgctacctgctgatctacctggtgttgctggtgggcctgggctggatgttcagccgcctgccctcctcgttcctgccagtggaagaccagggctacaccatcaccgacatccagttgccacccggtgcgagcaagaaccgcacggtgcaggtggccgagcagatcgaagcgcacaacgccgaggagcctggggtgggtgataccaccatgatcatgggcttcagcttctccggctccgggcagaacgcagcgctggcgtttaccacgctcaaggattggtcgcagcgcggcagcgacgattccgcttcgtcgattgccgaccgcgccaacatggccttcagcgagctgaaagatgcggtggcctacgcgatcctgccgccgcccgtggacggtctgggtacctccagcggcttcgagttccgcctgcaggaccgcggtggcgtgggccatgccgcgttgatggccgcgcgtaccgagttgctggcagcggccgcgaaaagcccgatcctggccaacgtgcgcgaaagcgcgctggccgaagcaccgcaagtgcagcttgaagtggaccgcaagcaggccaatgcgctgggcgtgtcgtttgccgatgtcggcaatgtgctgtcctcggccatcggttcggcctatatcaacgacttccccaaccagggccgcatgcagcgcgtggtggtgcaggccgaaggcgaccagcgcagccaggtggcggacttgatgaaaatcaacgtgcgcaacaacgccggcaagatggtgccactgtccgcctttgtcgaagccaaatggacccagggcccggctcagttgacccgttacaacggctacccggccatcgcgatttccggcgaagccgctccggggcacagtaccggcgaagccatggacgagatccagcggttggtcagccaactgcccgccggcctgggccaggaatggaccggcttgtcgttgcaggagcgcttgtccggctcccaggccccgatactgctgggcttgtcgctgctgatcgtgttcctgtgcctggcggcgttgtatgaaagctggtcgatcccgacctcggtactgctggtggtgccgctgggtgtgctgggcgcggtattggccgtggccttgcgtggcatgcccaacgatgtgttcttcaaagtgggcctgatcaccatcatcggcctgtcggcgaagaacgcgatcctgatcatcgaattcgccaaggacctgtacgaccagggtgaagacctgatgagcgccaccctgaaggctgcgcgcttgcgcttgcgaccgatcatcatgacctcgctggcgttcatcctcggcgtggtgccgctggcaattgccacgggtgccagttccgcgagccagcaggcgattggcaccggtgtgattggcggcatgatcaccgcaacgctggcggtggtgtttgtgccggtgttctttgtggtggtcatgaagctagtgaagaaatctccccggtaaaccgagttaaaccctgtgggagggggcttgcccccgatgcggtatgtcagctgaaccatttttcactgatacaccgccatcgggagcaagccccctcccacatgatgaggtacagtcagttgacccactgtcagctgtgagccgccatgcccttcctcgcccgcacccaccctcgcctctccgtcgccgccgtgctcggccttgccgtgggcatcctggcgccggctgacactctggtcagcaaaatcctgattggctggaacgccggggtctggacctacctggtactgatgctgtggctcacccgtcgcgccaaggccgaggacgtgaagcgcatcgccgaggtcgaagatgaaaacgccgggctggtgctgttcaccgtgtgcatcgccgccatcgccagcctggcgaccatcacctttgaactggtcggcagcaaggacctagccaccactgaacgtctgctgcactacggctttaccgggctgacagtgatcggttcatggttgctgatcggggtgattttcagcgtgcattacgcgcgcctgtattacacctgggacggcaaggagccggcgctgcgctttgccgaagggctgctgacgcccaactattgggacttcctgtatttctcgttcaccatcggcgtcgcggtgcagacctccgatgtgggcgtcgccacccgggcgatgcgcaaagtagtgctggggcaatcgctgatcggttttttgttcaacaccgcgatcctggggttctcgatcaatatcgccgccgggttgttcggttgatgctgcacaaaccttctagacgcccacccgacgctgggcgctaatagcctcacgtattccgcttcggtgatttatggccgcgcacaattggatcgacctgtcccaggacgccgacaccggcatcgagaccctgcgcgcgcattttgaaggtcatgcgtacgacccgcattggcacgacagctacctgatcggcgtaaccgagcaaggcgtgcagcaattcaactgccgccgtacccgacataacagcgtgcccggccaggtattcctggtggagcccggcgaattgcatgacggcgatgcgcccactgtagatggcttcacttaccacatgctctacctcgacccacagtggttggcgcgtgaagtcagcgcggtgtttgaagaagcaccgctcaatagccaactggctttcgccagcaccttgacccgcgacccgcgcctggccatggcgaccagccaagccttccagaccctgcacagcggcgaactgcgcatcgtgcgccagcgcgccatggaccagctgttggagcgcctcaccgaccaactctactggcgcactcgctaccgtgaagacccgcgcctgccactggttgcgcacaaggcgcgggaatacctgcacgcccatctgcacgttgatgtgggcatggacgaattggccctggcctgcggcgtcgaccgtttccgcctgacccgtgcgttcaagagcgcattcggcctgccgccccacgcctacctggtgcaactgcgcctggcccgcgcccgccacttgctggccaagggcgagcaacccgccgatgtcgcgatggccctcggttttgccgaccagagccacttgggccgctggttcgtgcgcgcctacggcttgacacccgccgcgtaccgcaagcgctgctcaaatcttccagacagatgacataccggccagtgaagatcgacgccatcactggatttgtcggagtcacctgccatgttgccgttcatgttgtttgcctttgtcgcctcgattacgccaggccctaccaatatcctggtgctgagtaacagcgcgcggtatggcttgagagccgcgttacccataatcctcggcgcctgcgtcggggctgccggtcttgtgttgctggtggggaccggcgtgggccagtccctggtgcatttgcccaaagtgcaaacggccatgcaatggaccggcgtcgcctggctgagctacctggcctggcagatcttcagtgcacccgcccaagccgtcgaagtggccgccagcgaaaaaccccttggcctgataggcgccgccagcctgcaattgatcaacccgaaaacctggatgatggcgctcgcggtggtgagtgtatttgccggccagggtgccgagcgccaaagccaggtggtgcagttgtccctggtgtttttcctgatctcgataccttgcctgggcacttgggcgctgctgggggccggcgcttcacgggtgtttcgttcggccacggccatgcaacgtttcaatcggggtatggccctgctgctgttgggcgcgacctggttgggtgtgctggtctgagcgtaccggtcatctggccttgccctgcatcttcttgacgactttactggtttagtgctctcctgaaaccggtttcagtcattccaataagaaaagaaggtcgatgaccgtgaacaaattttccgccgcccagcgcagccgcgtgaccatgctcgacgtcgccgagcgcgccggcgtgtccaaggctagcgtgtcgcgctttatcggcgacgaccgcgccctgctctccgatgccatcgccctgcgcatcgaacaagccatcgatgaactcggctatcgccccaaccagatggctcgcggcttgaaacgcggccgcacgcgcctgatcggcatgctggtggccgatatccgcaacccctattccattgccgtgatgcacggcgtcgaaactgcgtgccgccagcatggctacagcctggtggtgtgcaacaccgaccgcgatgacgcgcaggagcgccaacacctggcggcgctgcgttcgtacaacatcgaagggctgatcgtgaacaccctcggccatcacctcgaccaactgctggaactgcaacgggaaatgccgctggtgctggtggaccgcaaggtcgagccgctgcacagcgatctggtggggctggacaacccggcggcagtgcgcatggccgtggaacatctggagcgacagggttaccgcgatgtgctgatggtaagtgaagccaccgatggcaccagctcgcgcctggagcgcctggacagtttcaaagctgaaatcgccggccgcccggcattgaccggcgctgtgctggagttggatgaaacactgcaaaaacacctgcacacctttcttgccaaacctggccccaaggcactgttctgtgccaacggcgtcgcggcgctggcctgcacccgggtgctgaagaacctcggttgcaacttgttcgacgacatcggcctgatcgccctggatgacctggactggtatccgctggtaggcactggcatcaccgccctcgcccagccgaccgaagccatcggtgcaacggcattcaattgcctgctcaagcgcttgcgcggcgataccgagccaacacggaccctggatttcctgcccgagttgatccttcgtggctcgacccggcacgtctaaaaaattttgaacaaaaatgaaaccggtttcagaggtaaacaacaatgcataaataccccgtctccatcagcctttccagctacggcgcagacttggtacgccaacaaggccagttgagttttgtcgaggttctcgccgccgccggcgcccagcgcatcgaatggcgcgaagagcttttaacccacgaacagcccacggaactggccgaggccgcggcgcaacagaacctggaatcggtgttctcatcgcccctggaactgtgggtcgccggccgcgcccaaccgaatgccgaactggcagcgaccttggaccgcgcacaggctttcggcgcgcaatggttgaaagtatccctcggctacttcaccgacaccaacgacctggacagcctgcacgccctgctccgccgccaacccgtgcagttactggtggaaaacgaccagaccctgcacggcgggcgtatcgagccgatgcaacgcttcttcagcgaagtggagcgcctggccctgccggtgaagatgaccttcgatatcggcaactggcagtggcaggaccaatccgccctcaccgccgcacgcctgctgggccgacatgtggactacctgcattgcaaggccgtggcccgtcgcccggacggcaagctggtcgccgtgccgccgggcgccaccgacctgcatctgtgggaacaactgcttaagcatatgactcaaggaattacccgggcggtggaattcccgctgcaaggcgatgacctggtcgaggtcaccgcccggcacgttgccaccctcgccgtccttggccaaccgcgcgtggagaatgcccatgtctgagatcgatatcctgtcgtttggggaaaccatggcgatgttcgtcgccgaacagagcggcgacctggcgcaagtggcgcagtttcacaagcgcattgccggggccgatagcaacgtcgccatcggcctgtcgcgcctgggattcaacgtggcctggctgagccgggtaggcaatgattccctcgggcgctttgtggtggagaccttgagcaaagaaggcctggactgccggcatgtggcggtcgacccgttgcaccccaccggttttcagctcaagtcccgtgaagaaacgggtgatgaccctcaggtcgagtatttccgcaaaggctcggcggccagccatttgtccgttgcggccatcagccctgccctgctgcaagcccgccatctgcatgccaccggcattccgccagcgttgtccgccgccacccgcgagttgtctaccgagctgatgacgcagatgcgcaaggccgggcgcagcgtgtcgttcgaccccaacttgcgcccgtcgctgtgggccagcgaacagacgatgatccgcgaaatcaacgcccttgccggcctggccgattgggtgctgccgggcctgggcgaaggtcgactgctgaccggcttcgatgacccggccgacatcgccgcgttctacctcgaccagggcgccgaagccgtggcgatcaagctcggcccggacggcgcctactaccgcacgcaaatggaccaaggcttcgtcgccgccgtgcgcgtggacaaggtggtcgataccgtcggcgccggcgacggctttgccgtgggcatgatcagcgccctgctggaaaacctcagcttccgcgaagcggtacagcgcggcaactggatcggcagccgcgccgtgcaaagccgtggcgatatggaaggcttgcccacccgttcagagttacccgctcgatccgttgcctgattcattccctgttgccacaactacaacaagctcaggagcaaccccatggacaccgtgaaactcgccacccgccgttggtggtacatcatgcccatcgtttttatcacctacagcctggcgtacctggaccgcgccaactatggcttcgccgccgcctccgggatggccgaagacctgatgatcacccccggcatgtcgtcgttgctgggggcgctgtttttcctcggctacttttttttccaggtaccgggggcgatctatgcgcaaaagcgtagcgtcaagaagctgatcttcgtcagcctgatcctgtggggtggcctcgctaccctgaccggcgtggtctccaacgcctacatgctgatcgtgatccgcttcatgcttggcgtggtggaagcggcggtgatgccggcgatgctggtgtacctgtgccactggttcacccgtgccgaacgctcgcgcgccaataccttcctgatcctcggcaacccggtgaccatgctgtggatgtcggtggtgtcgggctacctggtgcagcatttcagctggcgctggatgtttatcatcgaaggcctgccggcggtgttgtgggcgtttatctggtggaaactggcggatgaaaagcccgcccaggccaaatggctgagcgacgccgagaaacaagacctggaaagcgcgctggccgctgaacaggtgggcatcaaggcggtgaagaactatgccgaggcattccgctcgcccaaggtgatcatcctggccctgcaatttttctgctggagcattggtgtgtacggcttcgtgttgtggctgccgtcgatcctcaagcaaggcttgcagatggacatggtcgaggccggctggttgtcggcgttgccttacctggcggcggtgatcggcatgctggtggtgtcgtggggctcggacaagctgcaaaaacgtaagcgcttcgtgtggccgccgttgttgatcgcctccatcgcgttctacgcgtcctatgtgctcggcgccgaacacttctggtggtcatacaccctgctggtgattgccggcgcgtgcatgtatgcgccctacgggccgtttttcgcgattgtcccggaaatcctcccggccaacgtcgccggcggcgccatggcgctgatcaacagcatgggcgccctcggttcgttcggcggttcgtacctggtgggctacctcaatagcagcaccggctcgcccggcgcctcgtacctgctgatgagcggcgcgttgctgctgtcagtggtattgacgatttttctcaagcccggtgccagtgaccgcacaccggcgcccaacctggaattgaaggtaaagaccgcatgaaaaagtctgtcgtgttgtacaaaaaactctccgcgccgttgatggcccgcctgcatgaacaggccgatgtcaccctgatcgaagcgctggacgagaccggcctggccaagctgcgcgatgccctgccgaccgctcacggtctattgggtgccagcctgcgcctggacgccacgctgctggacctggcgccacgactggaagcggtggcgagcgtgtcggtgggcgtcgacaactacgatatcgactacctcaccgggcgcggcatcctgctcagcaataccccggacgtgctcaccgaaaccaccgccgacaccggcttcgcgctgatcctggccaccgcccggcgtgtggtcgagctggccgacatggtgcgcgccggccagtggagcaagaatatcggcccggcgcatttcggcagcgatgtgcacggcaagaccctgggtatcatcggcatgggccgcatcggcgaagccctggcccagcgcgggcatttcggtttcggcatgccggtgatctaccacagccattcgcccaaacctttggtggaaaaacgctttggcgcgcagtaccgcagcctgaacgacttgctgcaacaggccgactttgtctgcctgacgctgccactcactgctgaaaccgagaagttgattggcgccgaacaattcgcactgatgggcccggagacgatctttatcaatatctcgcggggcaaggtggtggatgaggcggcactggtgcaggcgttgcaacagcgcaccattcgggcggcggggttggatgtgttcgagcaggagccgctggatcatggctcgccgttgttgcgcttgaacaatgtggtggccacgccgcatatcggctcggccacccatgagacgcgggaagccatggctacgtgtgcggtggagaatctgttgcaggcgctggcgggtgaaaaaccgaaaaacctggtgaacccaggggcctggaagcaatagcgctgacacaacacagggcaaatgtgggagggggcttgcccccgatggcggtgtatcagtcagccaatgtctagctgacacattgcaatcgggggcaagccccctcccaccttttgaccctatttcaggtcagataacgaaccgcgccaccatcccattcaggtccaccgccaaccgcgacagctcatggctggccgcgctggtctggttggcacccgccgccgactgggtcgccaggtcgcggatattgaccaggttgcggtccacttcgcgggacacctgggcctgttcttccgaagcgctggcgatcaccaggttacgctcgttgatcaggctgatggactgggtgatctgctccagggccacaccggcggcgcgggccatttccagggtgtcctgggtacgctggttgctctgttgcatcgattgcacggcttcaccggtgccgttctggataccggcgaccattttctcgatttcctgggtcgactgcgccgtacggtgggccaatgcccgcacttcgtcggccactaccgcaaagccacgccctgcttcaccggcacgcgccgcttcgatggcggcgttaagcgccagcaggttggtctgttcggcaatcgcgcggatcacgtccagcaccttgccaatgtcccggccttgggtggccaggccttcgatcatcgcggcagtgttctgcacgtcctgggtcatggtctggatcgcgccgacggtttccaccacacggtcgcgcccttcccgcgccgcctggttggactgggtcgacgcctcggaggtggacaccgcgttgcgcgccacttcttccaccgccgccgtcatctcgttgaccgccgtggcggcctggtcgatttcgttgttctgttgctgaaggcccttggaggcttcctcggtgaccgcgctcagttcctcagcggcagacgccagttgggtggccgagccggcaatgtgctggatggtctggcgcaggttgccttgcatggtcgacaacgcattcagcaagcgcgccggttcatccttgccgtcgtcttcaatggtcttggtcaggttgccaccggcgatggtttcggccacttccacggctttgcgcaagggggcgacgatgctgcgggtcagcagccaggccagcaataccgtgagcaatgcagcggcaaccgaaacgacaatagcgccagtgatggcactgctgtaattttgcccggcttcctcgttggcttgcttggcatccgctgcattgatagcgatcagcttgttcagttgctcgcccatctggtcggtaccgtccttgatccgcgtattgatcagggcacgcatctcatcgaccttgttctgcctggacagcgccagcatctcggcctgagccttgagatagttgtccagggtggtcgtgaataccttgtacagggcggcctcctcgggcccggcaggcaaggctgcgtaactggcctgggcggtcttcaccttgtcggccagcacgccgatacgcacttcagcttcctgaaggccggcaggctcacggttgaccagcacgcggaacgaaaggatgcgcatacgcagcacgttttcggtgatcaccgacagtgaagtcacgctcggcagttgattggtactcatgtccaccgaggcctggcggatcagcgtcatacggttgaccgcaaatacccccaatacaaccactaacacagcaataaacgcgaaaccgagagaagcgcgaggagcgatattcagattacggatggacatgggggtgctctcaaaagtagtgtctgcgcgcgtccgtgccgcgaaacgatctgtcagcgtcaacgcactgcccagaccttggtcaccaccgttgtcattagtatgtgggcctgaccacgctatcggccggcgctgtggtttcccgcagggggctttataaatatttttttacacttctgacgacaggcagtttctggcatcctgcgcctccattttctgacccgagcccgcattttgtctgacgctcaagctccgcgcccccgctataaatccgacctgatctacggtctggaagaccgcccgcacttcaccgccgcgatatttgccgcactgcagcatgtgttggcgagtttcgtcgggatcatcacgcctacgctgatcgtcggcggcgtgctgggcctggaaagcgaagtgccgtacctggtgagcatggcgctgttcgtgtcagggctcggcacctttgtgcaggcgcgcaccttcggcccgatcggctcggggctgctgtgcctgcaaggcaccagtttctcgtttatcagcgtgattctcagcgcgggcttcatggtcaaggcccggggtggcggcactgacgagatcctctcgacgatctttggtatctgctttttcgccgcgtttatcgaggtggtgctgagccagttcatcggcaagctgcgcaaactgatcaccccggtggtcaccggcaccatcatcacgctgatgggcttgtcgctgatcaaggtggcagtcaccgacatggccggcgggtttggcgccagcgaccttggcgccgcgagcaacatgggcctggcggcgctggtgctgctgaccatcgtggtactcaaccgcttcaataaccccttcctgcgcctgggctcgatcgtgatcggcctgaccctgggcttcgtcgtggcctggctgctgggccgcgtggacatggcggcgctgcctgaagtgccgctgatcagcgtgccggtgccgttcaagtacggtttctcgttcgactgggtggcgtttatcccggtggcggtgatcttcctgatttcgccgctggaagcagccggcgacctgacggccaactcgatgatttcccaacagccggtcaagggcccgctgtacatcaagcgcatcaagtccggcctactggccgacggcctcaactcggcgatggccgccaccttcaacagcctgccgatggtgaccttcgcccagaacaacggcgtgatccagttgaccggcgtggccagccgctacgtggcgtactttatcgccgggctgctggtgctgctggggctgttcccgatgatcggcgcggtactgcaactgatgcccaaaccggtgttgggcggcgccacactgatcatgttcggcaccgtggccgtggccgggatcaagatccttgccgaagccgggttgcaccggcgcaatgtgctgatcgtggcgatctccctcggtatgggcctgggcgtcgccgcggtgccggaagtattgcgcgagctgcccaaggcgctgcacaacatcttcgagtcgccgatcaccgtgggcgctttctgtgcaatcctgctgaacattttcctgccggaagagttcatagagctggaagaagatgaatttgatccggagtcctctaccctcaaagtgatgcaggacccggacgtcacgaaataggagcacctttgtatgcgcaggctcatggttctatcgctgttgctgctgagcttgagcgcctgtgcgctgttccccaaccgtgatccggtgaacatcaatgtggtcggcatcgagccgctgcaaagccaggacctggaagtgcgcttcgccgtgaagctgcgggtgcagaaccccaatgaaacggcgatcgactacaacggcgtggccctggacctggaggtcaatggccggccgttggcatcaggggtaagtgaccagagcggctccatcccgcgtttctccgagaccgtcctgatggtcccggtgagtgtttcggcgttctccgtgttgcgtcagaccctgggcctgagccagacccagagcctgaacaacctgccctacgtgctgcgaggcaaactggcgggtgggctgttcggcacgatgcgctttgtggaccgtggcacgctgaacctgcccaataccgccacctggtaattgacacggcttgccacaaggttgtgctcagtcggtgatgtagcgcacgccaggcttggcgcgttcgtccaccgtcaactcgaagacatccggccgggcgtaatgccccaccacgtcatagtcgtaccgcgcgcgcaccagctcatcggtatcaatgcgggccgtcagcagcccggcttctcccagcaacggcccggcgagaatgtcgcccatcggcccgacaatcacactgccgcccgcaatcaaagggcggtctgaaggccagttggccacctcgatacccaacgcctcaggcgaggcctggacctggcacgcgctgaccacaaagcaacgcccttcatgcgccacatgacgcatgctcacctgccacatctcacgctcatccaccgtcggcgcgcaccacacttccacgcccttggcatacatcgccgtgcgcagcagaggcatcatgttttcccaacacactgcgccaccgatgcggcccaccgctgtgtcgatcaccggcagcgtcgagccatcgcccttaccccagatcagccgttcggtaccggtgggcatcagcttgcggtgcttggccaccaggccgcccgccggctcgaagtacagcacggtgcaatacagggtgctgccactgcgctcgatcacaccgagcaccaggctggccccggtacgcgccgacaggccggccagcgcctcggtttccgcgcccggtacatcgatggcattggcaacgtaacgggcgaaggcttcgcggccttccggcaggcggtaacccaactgtgtgccgaacgcctcgcccttggggtagccacccagcagcgcttcaggcatcaccaccaattgcgcgccgctgcgcaggatctggtcctcataactcaggatttgcgccagggtttcacccttgccgccgggcaaggaaccgatttgcagggctgccacagtagaaacaggcatcacgatcactccaaataaagggggggttgcccattctcccgccagcctcgatcatgaataaagcccacttcagtgctgaatgatatgagccagatgaatatcgcccaggtcgatctcaacctgctgaaaaccttcgaagccctgcacgacgagtccagcgccagtcgcgcagccttgcgcctgggcgtcacgcaatcggcgatcagtgcaggtttgcggcgcttgcgcgaggtgtatggcgatcaattgttcgtgcgtaccgggcgcggcctggcgccgacgttgcgggccaaccagttgaagccggtgatcagtgaggcgctggaccgctgtcggcagagcctggcaatggtcaatccggataaccagcagtatcagggccgctcggtggtgcttgggttatccgatgatttcgagctggcctacggccgtcgactgatcgacgcgattgcacagcgtgcgcccaaactgcgagtgattttccgtcagacccacagccagatcgtcgccggtgccctgctcgaccgcacactggacctggcaattaccgccggcggttttgcccagggcaggctgagccgccaggtgctgggggaaggtgattatcgctgcctggtggattcggaccaggcacacatcagcctggacgagttcgtcacgcgcgagcacattctggtgtcgtcaggcgggtttatcggcatcaccgatgaaggcctggcggcgcagggcctgagccgccaggtgtgcgcgtcgaccagccactttgccgcgctaccgtttttgctcaagggcagccaagcggtagccacaattccggggcatgcggcccaggccattgcagagatgaccggcctgcgcgtgttgccctgcccgctggtactgccgcgctacccggtggagctgggctggcgtacccaggcgcagcttgatccgttgttgctgaaagtgcgtgaagcgatcgtggcgagctttacttgttggccgccatcagcttgttgacttcgctgcgcaccatgttggagaactccggcggcgacatgccgtcgagctctgcgcggacccattcggcccacttgcccttgcgcttggcgcgctcaccgaacaagcgtgcggcttcgcccttggccttgcccaggttggtttgccacaggtcgtagaggcgggacttttcatcttccagctcggcgcgttcggcgagggtcttgttggcgagattgaagctcatgttgaattacctgctgcacaaataggtgacatcttacactgtaggtcgaaatttcctgatccggattttgctcaagaacaggcagcggcaaaaaaactgcaacttttgccgctggccgacactccattgttcactgccacattcactcgcaaggagtcacacaatggcccgcaaaaccgctgcccaagccgtcgaagaccaaatcaaggaccaagccttcagcgaactgaccgcgctgatcgaagaatcggacaaactgctcaaaagcagcgccgccctggtcggcgaagaaggcgaaaccctgcgtgagcaggtcgccatcaagctcaagcaagccctggactcggtgtccaatgtgcgcgaacgcagcaagccggtggtggacgccaccgagacctacatcggtggccacccatggcagaccgtggcgatttccgcaggttttggcctggtggtcggcctgctgctcggtcgccgcaactaagtaagcaagatgggctgcgccagcggcgcagccctgtttaaagtcccgcgatctcccgcaattgttccagctctttgcgatcgatctcgatcccctgctcctgcgacttcgcccgtgtgcgatggcgccgatcccccggtaaacgccgcaaccccaccgcatgcatctgccgcaccagctcctggctgcgctcggcgaacgcttgcccggcggtcttgctcgggtcgatcacgatcaatagttcgccggtccagggtgtacgcgcccccggatgatcggcccaattgaattcgaaggaaaaattgccgccggtcaacgccgcagccagcagttcgaccatcatcgacaacgccgaccctttgtgcccgccaaatggcaggagtgcaccgccttccaggatcgccttggggtcctgggtcggctggcccaggctgtcgacgcccatgcccggcggcaggcgctcgcctttgcgcgcggcgatctgcacatcgccatgggcgatagcgctggtggccaggtcaaacacaatcggcatgccatcggcgcgaggtgcggcaaaggcgatggggttggtgccgaacaacgggcggtcggcgccatggggcaccacgcaggtcatgctgttgaccacgctcagggccaccaggccttcttcggcgaacggctcgacatccggccacagggcggcgaaatggtgggagttgtggatcgccatcagcgcaatgccagcactgcgggctttctccaccaacagcgcgcgggcggcttcgagcgccggttgcgcaaagccgttggctgcgtccacgcgaacaaaccctgaggcgacatccgtgaccaccggcaccgccttgccatccacccagccgctggccagggtgctgaggtaaccgggaatacggaacaccccatggctatgggcgccatcgcgctcggcacaggcgcagttgcgcgccaggatcgcggccacctcgggggaggtgccatggttcacgaagacctgatgaagcaacgccaccagttcggtaaagccgatgcgggccgtagcctgctcatggacctgtgacatctgaagctccgattttatgattggaaggggcaaccagcgtgaaatccaggcccacgattaaacaacgcggcccgcgcatgctgtcaacgtctgtttgtgcatcagcccccaccgctgcacttatttaccgccgagcccgaaccggccctccttaccctgaggccttcatacaatgacggtgagtatgcaatggcccgggtcacccctccctacttcttcgatgaattcctgctgcccataaaacgagacgaacccacaccgcgagaacgtgcgctggggttgaccgtcaaggacctggactggctgcatcgcctgtattacgcgaccgaccacgcacgccgaaacccggtgcaccaggaagcgcctatggtcgtggaaagcctgctgctgcagatcaaccagaaaccggacatccccctcgccgacgcgttcatcatgagccccagccccgacgggcaaaaggcactgctctatacgccctatgacggcctggaagtgttcgacagccgcgccgacgtgctcaccgagatcaccgagcgcctgaaggaccgctcacgccgcgccgacttgctgcgcttgctgtcgattgcccagcgcgcaaccctggacgctgccaaagcaccgaccgtggcggcacaggccattgaaggcccggtgatgcaacatcaggagcaggcgatccagcacgcccaattgcacaacgtgcagggcatgctcgaccaattgcgtcgtattcccgggctgccaacgatgctcgacacgtccctggccgtcatggcgcgcgcctacttccccagcctcgatcaccgcgatacacgcatgaacagctttgcgctcagtgacatagcgcctactgccgacccgcaatggctggcctccgtgccgttgagcgaggccttgctccactattacttgaaacagtcctggcccatcgggcagacgcgcacctttacccatcccaaacaggtcacttcgggctggacgccgacacaggtggcccaggaccagcgtcgctgggaaagcgtggtggagcagacagcgggaatcctgtcgaagctgctcggcagcttgttgcagacctactggaacgaagacatcaaggacggccactcccgcctggagctagtggcccagaccctcagcgacacgttccgtgccgagctgctgctcaagcgccaacaaggcatcctgagcgccgaagacagccagcagttgctggccatgtttctcccggacgcggcagcgcgcaccgcccatgccgagaacctgcgcgtcgaaaagatccgcgtcagcgcgccctcccagcactatgtcgacctggctggcacactgatgatcagcaatagccacgcctacctgtacacccagacccgcggcttgcaggtgctcaagaacatggaggatctgaacgccaccttgatcagcatgctcaaggccagcgggcatgaggacgagttactcaatttcctgtccctggatgaacgcaatgtgctgctcggccttgacccgctgcagatcatcggggtgcccatcaacggcgacatctttaccgaactggccaaagacattgcggccaagcaactgagcaacatggaatacgccctgggcctgtaccgtcgcagcgacggccaggtaaacctggaagcgctgctggactgtgccctggatgtacgcggcctgatcgaccatcgcctgcacacgctggacgccggcgggcgctggagcctgcaccccatcaccagcagcaatggacgcccgtccacggtgcaggccgaacgcgccaaacaacaatggcagcagttgaacacagttgaacaggcactggcctcggaccgtgcggcgcatccgacactcagacggttggcagcccatgcgctgaatgcggagctggataaacaccaacttcctttgatggccgaagaggtgaatatcaatacctacgcgaccgccgcacaacagcgcgaagaacgtgctcctctgcgctcattgaatatggtcgagcacttcatcgagcgcctggcgcatgaagccgtttcggtccccgaatcgaccactgtcgggttctacagcgcaccccgcagcggtatcgctaaacagttgaacagcctgaccacgacaaccttcaacacaatcatcgacagcgcgatggtgacattcgccaaccatgatgtacgcccactcccgcagatgttcctcaacagtcatcgcgctcacctgcggcacgccctgatgctcgggctgcgcagcgaggcagaactgcgccggttggacaacaccctcaggcagcgcggccaggaaatgctcgacaccgtattgcgcaccgacagcctgacgcgggtgaagcgccacgccttgaatggcttcctgccggacgcctacgggttgacgctgatggttgacgccgcttcacccgcgcagccgttggccaactgcctggtgctgaccgaacgcggcggcaccgacccgcagcgctccggccaggcggtgctgtggacgccccgccgcggtcatgaagtgttcaactccatacagcacctgcgcgaaaccttgcaaaaacgcctgcaagaccccatccaacgcctgcccttcctggaaaacctgccgaatcgcctgcgcacgccgcaccaggcctacaccctcggcccactgcaacgtatcgacgacgacctgctggacaaccgcctgcaaagccataccgaaaccctcaccgataacgtcgatacggtgctggcgatgaacctgggggcgcggcgcctgcaggactatctggacgtggtgatgcagcaggccgtgcccaccaacctgcccagggccatgcaactggcacgggccatggccaaccagcaggcactccccgtatggctggggatggcggcgcccgatgagcagatcctgcacgccgaattgctcgagcaatatcgcgtcagtgcaccggatgaacaggattacctgcacggaatcacaccactgaacgagcaggtcagcgctgcattggtcacgctgctggaagcacgtttcccaggcctgggactgcaccccgacaacatcctggtcccgatccgcaaggcgctgaacggcaacacccagagcctgaccgactttgcccagcgtcacctgcccgacctgcaggccgatgaaatccacccacgctcgcgcaccgcgacacccttgcccgcgacgctggacggcacagcagtggtgcaaatggtgcagcagttggacctcaaatcggtgtatcagacgtggctgaccacccatctgctggccacggacaacgacgcgcacacacgccggcaacgctactgccggcagctgccctggcagttgctgcaatacgcccatgaggaaaaactcgaagaacggatttccgccacggcctgggggtttatccagcaggtcttcgacatgcccgacgcggtcgcccgtgcgcaagtcagtggcgtgacagcgtgcattcgccccttgcaactggttgccacagccggcgcttcagtggccgacgtgcagggtgtctacctgatcgggccgcagaccaatgccacaggcccctgggtgttatacgcgccctacagcccgcaccatgtactgcgcgagtacgctcgggaagaagacttgctgagtgaactcaccaccccagggcacttgcaggaatgggttctccaacagttggacccaccccaccaggccacctatcgaaacctgctggcgcagcatcggcgcgacacggcggacattcggttggggtctgctcccatcctgggcaatattctcatgcgcctgttcaaggacaacgtcgtactgctgacgaaaatgctcgcctgtcaattcgacaagcaaggcgcggcgcaatggggagtggtcggtcgcctgctgcacaagggggttccgaatgcgctgaccttcatggccggcaagctcgcgtacccattggtggtgtggcgcagctacaagctgttcaaggcctcgagtgaacacttgcaacaacatcgctggggcgaggcactcaggacctttgtcggcggcgtggccgaattggcgtccttgcgcaaggcgctcaaccggctgtacccggacagtgaacctgcgaccacctttgatgacaatgactggacgcaggcctctgcgactaccaccctcgccacgctggatatcaccgccccgcagcgcacccacctgcaggcgttcgaacaacacgaagtcgccctgacggacctgagacacgaccccaagacccaggtctatcacgatgtggacactggccgggactacgtgccggtggcaggcaaagtctacccggcgcgaaacgccggtacccactggcgtatccaccgcgatgaagagtcagggcctgggctggcgcttacgccgtccaatcaatgggtgctggatttgcgaaaccgtgatcctcgtttcggcaaatcgatgtcgcggtttgccggccgggccgcgactcgcataggggaatggggctcgatcaatatcgaagcggtcggcatgacgcagatcgccgcactgtccagttggaaagcccagtgcatcaacgaggcgctcaacgtcgccacgtactacacggtgacctgcaaacgcaacatcctcaacttcgcgctcacgcgcgacccgctgagccggttgggccgcttttttaccgagctgttcggggttcatgccttgacgcccgatcacgtcggcaaagtggaaacacggatcgatgaggtgttgaacgaactggtgaaccccacgttgatcaatcctgactcgatacgctttgtcacggggaccgcgcgctacagcccggaacacctgattgccttcaccctgcccaacgacatcgacaaaaaaatctatttgctcgaccgtttttttgcccccgatctggacatgtaccagaaccgcttgaatgcccctttcaacatcatggcccacgcacgcgccacgaccttgatccacgagttgacccacttggtgtctgactctgaagacttggcctacctggacagcatgcggccgtttaccgacctgatcaatgtgcaatccccgcgtggcaggcaactccatgccgaactggatcacttgcgcttgaacgccctgtctacccagacacccggcgtcatcttgttcaaggtctgggacgattacgcgcagcaattcgaagaactgggcaggcgccacgcctcccggaccgcacgcacccgggtgttgaacatcaccggcgccaagacactcgacgatgcgcgccaggtattcatgagtgacgacagcaaacgcatcaacatcatcctggccaacgccgattcaatcgcctacatgatcactcacctgggtcgagaactggacccgggagcctgagcagcccccgggtggatatcagtctttctgatcgcgaatgacgttgcccgaagccccatctatgcgggcttcgtacaccacgccatccgacttgcgacccttgacctcccagtagccgttatcatcggcttcggcggcataaacctcgacataaccggccttggtcttggccacctcgatggctttttcaatggtgatccaaccggctcccgggcggtcggccatggcggcgccggcgctgagcaatgcggaggttgcacacagggcgattaatgttttcttcagcattttcgtactccattggtggtaatgactgacacgtgtcctgaaatttttaggcgcatccaaacgagaataagttccaattgatgtgcaatcgccatgatggctgttctcgccgtccctcccaggaggttagaatgtgcgaaatcaggacgagttaatgagcgaaaaagccctttcagaagccgaatatgacgctatcaccgacgccgccgcgcattggtgcatgcgcctgcatgcgagcgattgcacgcccggcgaacgtcaggcctttgcccagtggcatgattcgcaccccctgcacgcctttgaatacgcggcgatgctggagatctgggacgtcgccgaccacctgccgcgcagcgacacagcgccggtggtggtgccattcaaaccgcgcagccgtttgcgcacctatgcggtggcagcggctatctgcctggccgccctgcccctcgccgcctttaccggctggcaagccggttggctgccgagttcctatgagcgctacgatgctgccagcggcctgcgccaagtgacgctcggcgacggcagccaggtggagctcaacctgggcaccgagctggtctacagcaactacaaggaccagcgccgcgtcaccctgaacaagggcgaggcgttcttcaaggtcagccatgacagtgcgcacccgtttgtcgtgcacgccggcgcgggccaggtgcgcgtgacgggtacccagttcaacgtctggaagtatgaagaccaagtgcgggtgatgctgcttgaaggctcggtgcagatcagcagcgaccaggtgcacggcagcgtacccctcacccccggcatgcaggccagctatcaacagggcgatgccacaccgagcgtgcgtgcgatcagcccgaatgactcggccctggcctggcgccaaggcaagctgatcctcgacaacctggccctggccgatgcgttgccgctgatcaaccgctacctcagcaaaccggcgatgctggccgacgccagcaccggggcgattcgcatcggtggcatctacaacatcaacgaggtcagcaacctcatcccctccctgcccaaggttttgccggtctacctgacccagaaccaggacggcaatcccgtcctcaattccattccgcgtaaagcccccaaaggctgagcctgttgcgtcgtgcttttggcttcgttgcgcccgcactgtccattttttttacacacaccgtccctggatcgcccgtgcacagcggattcatcgtttcgtcatgcacggtgttacagcgctgatacaacggggtgaagcggttgtgcagtggatggatagccgggccttcgagggcggttgtctcaccgctgatacagcaaggccatcattttgccttgcagttatcgcaagcctttgaaaaacagtaataaatcaaaagcggcacgggttctgctctttccctgacaacgctgtttagggtcagcgtgaagaataaggaatgccgccgtgatcacactcactcaaggttcgatgaacgtactgctggccagctgtgtactcagcgccagtatcagtcttccagccctggcaggtgatggtgtgatcgtgacgggccgcgacgtacagggtcatatgtatggccgctcctcctttggcccggatccttacccccagaccgccaacgccaatcccagccgagaaatcaacagcgccctgtcgggcgagttgagcgaccgtgacttcggcggcgtcagcagtggcctgggcatcactcgcaccgccctccagcccaacagcaacctcaccggcttgagtgccacgcaaaacggcatgtccacgctgggcgcaggcgcagcagccagccgctcgggcggcagcggcagcatgggtgggcagatcagcgattcgattcagcgcggcatggcgcccctgaacaatttgggcggcatgctggggggcaaaccatgaaacgctccctgttcattctggccctgctgggcagcgccgtggcgatggccgacaacaacgccgtgatcaacaacagcggcaaggactacaccggcaacctgatgatcaaccaggcggcgggcaaccagcagcaaacggcgaacaaccgcgctgtcacgctgggcggccaggccaccaccggcaatatccagaggatggacggcaaggtcgatcctgccctgaacgccaaggcggcgatcgagggcacttcttttaccaatggcaacggcatgttgggcgtcaaccagtccgccggggccaataaccaattagtcaatgccgtgcggatcagcgtcaatcctggcccgcaagccatcgacgacagcgtcctgttgcaacagaacacgacgacgctggcaaccgactcagggctcacccccaccactggcagccgccaggtcgtgacaagcgaccaggccttcaccggcagccgaggagtgatacaggtgaaccagagtgccggggtggggaaccgagtggctaacaccctgggcatcactatcaagtaacagcttggtagcactagctagaccgtaccaacacttaaccaactaattagaagcaaggagaaacaccatgaaacctcaaatggctctgaaaccaatggttttcgcgctcgccgcactcatggctgctgcagctcaagcaggtggcggtggctggcatccagcgcctcaaccaactggcgtggttgcctctgtcgtgaccgatgtgcaaaacagcattggcaacaaatacgacgacaccaagaccgaaaacaacgcctctgccgataattcggtaaacggcaacagcggtaacgccggcgtcaacattcaggccggcagtggcaaccaggccgataactctggcgccatctccagcgccaaaggcgactttgcaactgtgttcgctgtggtcgatgtgaatcaaaacagcgcactgaacaacttcgtcaacaaaggcacccagaacaacgcctccctggataactccgtgaaccgtaactccggcaacgtgggttacaacggtcaagccggtcaaggcaaccagggtaaaaacaacctggcaatcaccacggctgatggcaaaaacatcgcagcggctgccaataccgaacaaaactcgctcgccaacaactacctcaataccgccgctaccgggtacggccatcacggcggcaaacctcaatatgtgtcgaacaacgccagtgccgataactcgatcaacaacaactccggcaacatcggtgtgaacctgcaatccggcgctggcaaccaaggcagcaacagcctgtctgtaggccaaggctgcagcgtttgcagcagcggcgtgcgcttctgatccaacggggccttggcaacaaggcccttttttattccagtgtccattaggtcagacgatcatgcgcctcgcgaccctcaccctcttgatgctgctcaccggcccgacctgggcaggcaccatggcgatttccgccatgcctggcggtgcagtcatctacaagaaggtcgagagcatccgcgaacgccgcttcgccaacctggtggaacagaaaaccgatttcagctgcggtgccgcggcactcgccaccatcctgcgccagggctattggctcgacgtcgacgaagaccacgtgatcaaaggcatgctggtcaatgcagaccaggacctggttcgcacccagggtttttccatgctggacatgaagcgctacctcgaaagcatcggcatgcgggcccggggctacaagatttcgccggacaccctggtgaccgtgaaaatccccgtggtggtgctgctggagattcgtggctacaagcacttcgtggtgttgcagcgcgccgacaaggactgggtctatatcggcgacccggtgctgggccacaagcgctattcgcgcgacgacttcgtcaagggttggaacggcatcgtgttcgccgtgctgggtgaaggctacgacaaggccaatgccttgctcgacccgcccacaccgctcaccgcgaagaaccagctggacaaattccatcctgtaaaagatgccgagctgatggatttcggtttcatccagagcgacttcttctaagaagcgcaataaggggcaggacgctccaggagcagcagatgaacacttcccgttggctgacggtcttgtgtctggcagcctcaatgcccgcttatgcttcatcggcattcaagccgatcgaactcaaggattcggaaatggccgagttgcgcggccgttatgtgatgccggggcggatcatcagcttcggtattgtcatgagcagcacctggaccaatgccgtgggcgacaccctcaccggcaaggccagcatgcaagtcgactcatcgaccattacgccacagttctacgtgcagaccaccggttcgaccgggaatggcaccaacccgagcaccggcaccggtaacgtcaccggaggcgccggcctgggcaccggcacaggcgtgacccagagcgtgcgcgctgccggcgacaaaaacaccgcctacaacaatgtcgggatcaacctcactgaaaacggctttgcgccttccaatgccgcgcaatcggggcaggtgctggtggccggcggtacggtcaccggcgacagcgcggcaggccgggtgagcgtctcggccaacaatggcggcttgcagatggcgatccaggccaatcataaccaaggcaacagcctccagcagattggtggcggccaggtgctgcaaggcacggtactgaccggcaacaacaacttcgtcaacaacatgacccagctcaacgtggtaatgaataacggattgaacaaccccgcgttgaactgcaacctggatcaactcaaaggcctacgcactctcggttattgaactacgctgaccctcgacactttcgcattagaaaaggacggcttatttcatgcatcgatcgttatcgctacgtgcggtggtctgtttaagtacgctcttgcccgcatccatgttgtatgccgcgccagacgccgatatcgagaccctcaaacaggaacttctggagctcaagcagcggtacgaagtgcagcaaaaagccctggcggtgttggagcaacgggtgcgccaggtcgaggacacgccggcgacgccagcacccaaacgcctggccaaatccccggcggactttcagaaagccagcggtgccacggtggctggcacgggagcggcagcggcatccggcggtgcaggcggcggcagttcctatgggcagtcgctcaaggacgattcagcgcctgcgcaaagcgtgagcaacctctataacgaggccagcggcttcttcggtaacggcaaattcagctttgaaaccgggatcacgtatgcgcgttacgatgcgcgccagctcacgctcaacggcttcctggcgctggactcgatcttcctgggtaatatcaacctggaccgaatcaagtcggacaactggaccctggacctgacggggcgttacaacgtcgataaccgttggcagttcgatgtgaacgtgccggtggtttaccgcgagtcgacttatcagtccggcggcgccggcaacaacgccaacgccacctcggaagaatccgtgagccgtgacccgaccatcggcgacgtcaacttcggggtggcctacaagttcctcgacgaaacccccaccctgccggatgcggtggtgtcgctgcgcgtcaaggcgccaacgggtaaagaaccgtttggcatcaagctggtcaggtcaaccgccaacgacaacctgtatgtgccggaaaacctgcccaccggtaatggcgtgtggtcggttacgccaggtatctcgctggtcaagacgttcgaccctgcggtgctgtttggttcgttctcctacacccacaactttcaagagtcgtttgacgacatcagcagcgacgtcaaccagaaagtcggcggcaaggtcagcctgggcgacagcttccaattcggtgtgggcgtggcgttcgccctgaacgagaagatgagtatgtcgttctcggtctccgacctggtgcaacgcaagagcaagctcaagcctaacggtggggattggcagtcggtggtgtccagcgatgccaacgccggttacttcaacgtgggcatgaccattgcggcgtcggataacctgacgatcgtgccgaacctggcgatcgggatgacggatgatgcgccggattttacgtttagcttgaagtttccgtattacttttagggagagccgggggggctgcttcgcagcccaacgcggggcaagcccgctcgccacagcaagccgccttaccacggcgagcccgctcgctacagcacacaaggaaaagccccgcaacgataagggtcgttgcggggcttttcggtttacccgccctagcggatctggtgtttgtgcagcaaccggtagaacgtcggccgggaaacccccagcacacgggccgcgacactcaggttgtcgctgtgccggtcgagcacatcgcacagcgcctggcgttcggcgcggtgcttgtagtcttccagtgtagccatcggcggcgaaattgcctgttcagcctgcaatcccagatcaacggcctcgatctggcgcccttcagccagcaccaggccacggcgcacgcggttggccagctcgcgcacattgcccggccaaccgtgttttgccatcgccaccagggcgctctcgctgaaactgcgtgggcggcgacccgtctcctggctgtaaaagcgcgaaaagtggttggccagcatcgccacgtcaccatgacgctcacgcaacggcgccgtcaccacttgcaggacgttgagccggtaatacaagtcttcgcgaaaagcgcccctttcgactgcggcctccaggtcgacgtgggtcgcggccaacacccgcacatccacgggaatgggctggctgccgccgacgcgctcgatctgtttttcttgaaggaagcgcagcaggttggcttgcagctccatcggcaaatcgccgatctcatccaggaacagcgtgccgccgtgagccgcttcaatgcgcccgaccttgcgctgatgggcgccggtaaacgcgcccttttcatggccgaacaactcggattggatcaggtgttccgggatcgccccgcagttgatcgcaacaaagggcttggcatgccgctgggattgacgatgcaacgtcttggccaccagctctttacccgtgccgctgtcaccacggatcaacaccggtgattcggtgggcgccagctttgatagtagtttgcgcagctcacggattgcccggctgtcacccagcagctcatgctccggctcatccaccagggtgtggcccttgccgcgcaggcgcgccatgccgaaggcacggcccagggtgacctgcacccgggccacgtcgaagggcaaggtgtggaagtcgaaaaaccactcgcagacaaaatcacccacgttctgcaggcgcagtacatccgggctgaggacggcaatccactcggtgccgctgcggccgatcaactccttgaccgcttcggggcgctccaagtgggagggttgcaagcgtaacaggccaacatcgcaggaccgctcgccaaccgcctccaatgggcaactgtcgaccgcccagccggccgtgcgcaaaccgggcagcaggtcgtggcaatcgtcacagggatcaaccactagcaaccgacgttgaacggggggcacacccatgactgttccttggcgtcaaaattgttaaagttatttagaaacaacggtttgtgacgcctgcggctaacactagcaaggtcttgacgcaccgcttgtaccgtttcgctataagtcggggcaaaaagccacttctgcgcgcctttgccgaaaagttgggctatgccgaaactttcattcagctttcaaaacagccgcttacatgacgtcaatcactaaaagtttaaaatagttgctctaacatgtgacccgtaccccgccatcgtgcatcagtacaagtaacccgccgcacggtcagcccaaccgccggcaatcacttgaatgggcatttagagagacgacccacatgaacgccccgctccgcatcaacgaagctcttttgatcgcagaccgtgctttccaaccctttcagtgcgtggcctggcatgacggcaatggcgccctgagcctgagcgtcatcgaccgcaccaatacccgtatcggcagccggcaactggatgcgcgcacttattccaaccccgcacaacttgaagacttgctgttgcaggcgcgtgccgagttggacaagagcggctatcagttgcaagcctgggccatgccgaagtaactcagcgcaccgttgagctgacgtcttcgctaaagaacaccgtttcggcaacttcgtgatcaatgttcgagcgcagaacattgatcagaagttctcggttagaggcgtagtcctttaacttcgcgtagccgatgttgcgctcggcatagcgtttgaggtgtccacggataaagtggtaatcgatatccgtgcagcgaccggctcgtggacttttcacgcacctcgaactccagaatcaacagacgtaccatcacccgcaaggcaacctcctgacatgaaggccatgcggcaaagtcaacgccccgaggtgtggggcgcagaattcagcgtccattgttggcgtactgcattgccttatcgctgtaactgtctagcgtatgttgcagccggccaggataaaccgctcgatcgcctcggcggcgccatcctcgaggttactgccggtgaccacactggcttgacgcttgacggtttcctccgcctgccccatggcaatcgacaacccggccacctcaaacatcgccgggtcattgccaccatcgccgatcgccgcggtctgctccagtggtatgcccaggtgtgcagccagggtcttcagggcttcacccttgttggccaacatcgccgtcacatccagataaaccggttgtgagcgcgacacgtgtgccagcccctgtaccttgggttgcaactgcgcttccagctcgaccagccgctgggtgttgttgctcgccgcgacgatcttgtcgatccgatccaggtagggctcgaaactctctaccaccaccggcccgtagcccaggccatcagcttcgcgctgcaccatcggcccgggcggatcgcgacgcagccagtcaccgtcggcaaacacccacacttccacgtccggctcgcctgaaaacagcgccagggtgaccagcgccgcttccgccggcaaatggtgggcaaccaggatgctgccatccgggttgatcagcgtaccgccgttgaagcccgccaccggcacatcgataccgaacgtttcgatcagatgcagcatggccttgggcggacgcccgctggccaggctgaaaaacaccccggcgtcacgcagcgcacgcaccgcgtcggcggtgcgctggctgaggtggtggtccgggtgcagcaaggtgccgtccacgtcactgaggataaaacggatggggtgaatcgctgcatcactcatccgaggctgtgccacgtgcggccatcacgggccagcaacgcgtcggcggcagccgggccgtcttcaccggccttgtaggcctggatgccgtcgtcttccttccacgcatccaggaagggctgcaccgcacgccagccgttctcgatgttgtcggcacgctggaacaaggtctggtcgccggtcatgcagtcgtagatcagggtttcgtacccggtcgacggctgcatttcgaagaagtccttgtaggcaaaacccaactggatattggccatgtccagggtcggcccgggctttttcgccagcaaatcgaaccacatgccttcattcggctggatctggattttaaggtaggtgggcttgagctcgtcgacctcggtgtcacggaactgcgcatagggtgctggcttgaagcagatcacgatttcggtgtcgcgcacgctcatgcgcttgccggtgcgcaggtagaacggcacgccgacccagcgccagttgtcgatcattaccttcagggcgacgaaggtctcggtgctgctgtcaggcgctacgttgggttcttcacggtagcccggcagtgacttgccaccgatttcaccggcggtgtactgcccgcgtaccgaattggcccgcgcatcctccagggaccagggccgcacggcaccgatcaccttggctttttcaccacgtacggcgtcggcaccaaaggctgcgggcggctccatggccaccatcgccagcaactggaacaggtggttgggcaccatgtcgcgcagggtgccggttttttcgaagaaattgccccgggtttcaacgccgacggtctcggcggcggtgatttgcacgtggtcgatgtaatggttgttccagaacgcctcgaacagcacgttggagaaacggctgatcaggatgttctgcaccgtttccttgcccaggtaatggtcaatacggtagatctgcttctcgctcatcaccttgagcaggctggcgttcagcgcctcggcggtggccaggtcggagccgaagggcttctcgatgaccacgcgccggaagctgtcgtcggtttccgtcagcaggccggcactgcccaggcgttgcaccacttcactgaagaaacgcggcgcggtggccaggtagaataccgcgttgccggtgccactgtcggcaatcttctggccgatgtcggcgtaggtgctgtcgtcgaggaagtcgccctcgacgtagctgatgcccttggccagttgcgcccacaacgctgggtcgagagcgttatcggcattgcccttgaccttgctcgccgcttcggtgcggatgaagtcttcgagtttcttggcgaagtcggcgtcgctgatcgcattgtgatccacgccgacaatgcgcaagccatcgcccagcaggccatcacggctgaggttgtacagcgccggcatcagcaggcgcttgacaagatcaccatgggcaccaaacagaaacagggtggtgggcggagcgggttcggccttgggtttcttgccgttggcggtcattttttggaagtctccacgtgaccaccaaagccgaagcgcatggcagagagcattttgtcaccgtaagtgctctgctggcgcgaacggaagcgggcgaacagcgaagtggacagtactggcaccggcacggcttgttccaaggcggcttcgatggtccagcggccttcgccactgtcggccaccgagcctgagtagccgtcgagcttcgggtcggtggccagggcgtcggcggtcaggtccagcagccaggacgagaccacactgccacggcgccagacttcggcgatgtcagcgacgttgaggtcgaaacgctggtcttcgggcaggttttccgaattcttggtcttgaggatgtcgaacccttcggcaaacgcctgcatcatcccgtactcgatgccattgtggatcatcttcacgaagtgcccggaaccggcagggcctgcgtggatgtaaccctgctcggcacgcgggtcggcgctggcggaacggtccttggtacgcgggatattgccaaggcccggggccaggctcttgaagatagggtcaaggcgctgcacggtctcggcgtcgccaccgatcatcatgcaatagccgcgctccaggccccagacgccgcctgaggtgccgacgtcgacatagtgcaggccctttgccgccagggccttggcccggcgcacgtcgtccttatagttggtgttgccaccgtcgatgattgcatcaccgtcttccagcagcgtactcaattcgttgatggtgtcttcggtgggcgcgcccgccggcaacatgacccacacggtgcgtggcttttgcagcccggaaaccagggccttgaggtcggaaacgccggtggcgccctcttcgctcaggccttttacaaatgcttcgttacggtcgtaaacaacggtggtatgcccattgagcatcaggcgccgtgcaatattcccgcccatgcggcctagtccgataatccccagttgcatgtgctgatgctcctaactactaaaaaatgtgtgacatagtttatagcgcaatgcggctaatgagggttagtccagcgcggataccgctagtttcatggaaaaaagttgccatcgtttcagcatcacggcacaaaaagtcacacgaccatcaaaaataaaaaagttccattgcctgcaaaaagaattcagaattgccctgactgctgccgagaacctcgactcaagcgttctggcacaccgcgacacaccggctatttgcgaggtaagcaatgagcactgcacagatgacacgtccgccacagaccctctacgtcactatccgtcgcgacgagttgcgccagttgaaagacgagcgcgaacagctgcagcaggaagtcctgcgcctgcgtgcccatatcatccaggcccaattggaccagcccgccggtgcacaacccgcgctctgctgagccccgtcatcgctttgtaagataaccgctacaaaaatctcacaaagttttcacatgcctctcccgatactccagcccccaagggccaccccatgcaagggtggcttctgttgcgtgcagcactgcgcgtcaactgaaacatcaacgggttggagcgctggatggcgatgttcaaacgcagcaccacgtctgcgaaaggctttgattgggccggccttggctggctgttcctgtttttctggtacttctcgggcattacccaactgctgatccagttgactgggacttccggtttcagtggttttcgccaagccttcttcatgagtgcactgtggcttgcgcccatgctgctgttcccccgccgtacacgactgctcgccgccttgatcggcgtggtgctgtgggcgtgttccatggccagcctgggttatttcttcatctaccagcaggaattctcccaaagcgtcatcttcatcatgttcgagtcgaacatctcggaagccggcgaatacgccacccagtattttgcctggtggatcgtgttggcgttcatcgcccataccgccttcgccgtcttcctgtggacgcggctgcgcccggtctacctgcctcgcggccagtcgatgctggcggcggcagcgattgtgctggcggtggtgggttatccgctggtcaagcagatcgccaccagcgacaacatggaacaggccatcgatcgctttgaaacccgtatcgaaccggccgtgccgtggcagatgatcgtcgcctaccgccgctacaccgagcaactggacaacatgcaaggcatgctcgacagcgccagccagatcccgcccctgaccaacctcaaggacaccatggccggccaaccgtcgaccctggtgctggtgatcggcgagtccaccaaccgccagcgcatgagcctctacggctacccgcgcaacaccacgccggagctggacaaactgcgtgaccaactggcggtgttcgacaacgtcatcaccccgcgcccctacaccatcgaggcgttgcaacaggtgctgaccttcgccgacgaagaaaaccccgacctgtacctgaagacgccgtccatcgtcagcgtgatgaaacaggccggctacaagacctactggatcaccaaccagcagaccatgaccaagcgcaacaccatgctcacgaccttttccgaacaggccgacgagcaggtgtacctgaacaacaaccgcaaccagaacgcccgccaatacgatggcgacgtgctggcgccgttttccaaggccctggccgatccggccgagcgcaagttcatcgtggtgcatttgctgggtacccacatgagctaccagtaccgctacccgccaaccttcgacaaattcaccgaccgccagggcgtgcccgcgggcatcagcgacgaccagttacccacctacaacagctacgacaatgcggtgttgtacaacgacttcgtggtgtcaagcctgatcaaggactacgccaagaccgatccgaacggcttcctgctgtacctgtcggaccatggcgaagatgtcttcgactcgattggccacaccaccctgggacgtaacgaaggcaagccgacagcgccgatgtacaccattccgttcatggcctatgcctcaccgaaatggcgcgaaacccacgactggagcttcgccggtgacttgcaacggccctactccagctcgcagttgattcacacctgggctgatctggccggtcttagcttcaatgaactggaccgtacaaaaagcctggtgagtgacagcttcacaccgcgcccgcggatgattggcaacccttacgagcgccaacaaaagcccctgatcgacttcagcctgatcaagccgaaaaaggccaacccgaccgacgtggtgctgcaggaaaaaccggccttgtaacagaaagataacaatcattctcgtttaagcctaaagttccccctgtcctttcgtctttgaaccaaggccttttccgaccggaaaggccgcaaagacgacaaggagtcttccgcgatgttcgcgcctttcacccgttccatgacgctcaccctcggcctcttcagcgtgggcgcaagccccgacctgctggctgaaaccgaccccgaacaccaagccctcgagctgcgggccaccagcatcaccgccgagggcctgggcgccaccaccgagcacaccggggcctacaccaccggctcgatgagcacggccacacggctgaacctttcggtcaaggaaaccccacaatcgatctcggtgatcactcgccagcagatggatgatttcaatctcaatacattgaccgaagtgctacgccagaccaccggggtcaacgtccagcacaacgactccgaccgtgtgtcctattcctcccgtggctacggcatcaacaacttccagattgacgggatgctcaacaccttcggctacatgaagtccgattccgacaccatcatctacgaccgcatcgaggtggttcgcggcgctaccggcttgaccactggtgcgggtgacccctcggccacggtcaatatggtgcgcaagcgccccaccgcccagtggcaggcgaaaaccggggtgagcggtggcagccatgacaactactacagcttcgtggatgtcggcggcccgttggcgtacgacggcaagctgcgcgggcgtacagtgctggcctatcgcgacagcaaatcgttccgtgacaactacgcgctgcagcgggcagtcggctacggcatccttgaaggcgacctgtcggacgacaccgtgctggcggtcggttttgattaccaggacaaaaaggtacagggcacatcctggggcactgtgccctactggaacagccagggcggcaaggctgggttgtcgcgctccaccaatatggcagcgcactggagctcctggccgctgaccgacaagaccacctttgccagcctcgatcaccgcctgaatggcgactggcacttgaaggcggcctacacccatcgccagagcgacacggacggcaaggtctactacggcggtgcggggttccccaacgacgaccgcagcggcatgaccgcctgggccagccatatgcgcggcacgtcgagaatggaggcgattgacctgaacctggctggcagctatgcgctgctgggccgtgaacatgaactgatgatgggttatggcgaggccacgcagcgggacgtctcgcccgtgatgcgcagcagcatccccggcggctactacagcatcgaagactggaaatacatgggcgggatcggcaagttcgccgacaccgtgaccgggctcaagggtgagcacagcagcaagcaacagaaagctggctacctggccacgcgcctgagcctgaccgagcgcctgcatgcggtactcggcagccgttatggcagctgggagctggaaagcgcggcgcctgaatacacggccaatgaccaattgctcagggccaacaagacccgccagacccacaacgatatgtggacaccctacgccgggctgctctacgacatcacgccggagtacaccgtctacgccagctacaccgacatcttcaagccgcagagcctcaaggacgtcaacgagaagtacctggagcccgtggtgggcagcaactatgaagtcgggctcaagggcagcttgctgcaggagcgcttgaacgtagcggccgcctatttctggagcaagcaggacaacgtcgccgaacgggactactccgtactgccgaaccccaaaacgggcgaggagtactacaagtcaggcggcaagggtaacaaggtgagcggtttcgagctggaggtggccggcgaagtgatgccggactggaatctcacggccggctacacctatacccactcagtgaatggcacgcacaaacgcaacaacaccggccagccgctgaacctgctgaaggtctccagtgcctaccgtttacccggtgcatggcgcaacctgacggtcggcggtgccgtgaactggcagagcgatatctacgaattcagcaaccggccaacgggggctcgtgacagcaagggcaaccggatcaccacacgggcaaagatcactcagcaggcctacagcgtggtcaacctgatgtcccgctatcagttcgatgaacatgttacggcgtcgttaaacgtcaacaatctatttgataaaaagtattacgagcgcgttggtttttataacggcgtgtattggggtgacccacgctcgatcaccttggcattggactggaagatgtaggaccttttaaccaaaagttaacgaaattgttagcttttggtttttttggcgttaattcctacttaataaactccctccacactcgccccatgaatctgatcaaggacagagcggataccgatcacacttaccggaaacactgccatgaaactctccaccctgatgcttgccagcctgatgaccctgacctccgccgccgcctttgccgaaggcggctccgagcgttccaaggcgttctacaacgacttcaccttcgtgcagcaacaaacccacggcaccgctgcacaaaccgcgcttgccgatggaaagaacgtgaagaaagaaaccgctgaccagtccgctgccgagcaacaaccaaacacttgatgtaaccgtaataccctttgccatcccgctcctttggttaaggtcaacttggcgccatttaatggcgcctttttttgcctgttatttattaaagcggtttgctccagaacaacatgcgcccgtgggccgggtcaaacttcgaatcatcaaaaccaaacttgcgatatgccgattgagccacggcattaccctcgagcacctccagggtgatcttgcagcagccacgctgacgggcaatttcctcgaccttttgcagcattttctggctcagccccaaaccacggaacgcctccatcaccgccacgtcgtggacgttgaccaaaggacggcaggcaaacgtggaaaacccttcaaaacaattgaccagacccgctggctcaccgcctacaaacgccagtacgctgaatgcatgaggccgctttgccagctcgcctggcagttgctccaggaggtcggcgggcaggctgtggccaccgcccatcgggtcttcggcgtaatggttgagcacgcggccgatggcgtcggcatgcacggggttggtgtagctggcttgcagcaccaggatgtctggggtgtccatgtccttcctcgatcacgattacaagggattcggctccctgtgaggggcacgattgtaagcgtggagcaggcgccagatgaaggagattaactacaaatatgcgcacgaaagcgcgaaggttactcggttgaaaacgcgcaaccggccgactcctggattttttcgtacgggcgtcagccgaaacgctgcaactgcatttcttgcaggcggctgagtgtcctgcggaagggaaactccaggtagccctcggtataaagtcgctccagaggcacctgggcctcgatgaacaacggcactttacggtcgtagcactcgtccaccagggcgataaaccgacgcacgctgtcatcgtgcaccgacaactccggcaattggcgatcaccggccactacacgttgcacgccatcctcagtgccccgggcaatccggccaggccgtttttgcgcactgaggttggggacttcaccgagcaggatcgccttgaagcgatcgcacagcagcatgaagtccatggccgccagcggttgttcgcacaggtcggcgtaacgacaccagagcaccgtgtcgctggactgcacggcgacgatggtgcggtgccccaccacgagcggcccgctgcgagtcggttgaccttgggccaagcgctggaacacgcccgccagtacctcgggttggttggcccagtagcgctgaatacccgcgcccggatgcaaccggtgatcctctcccccatccaccgcaaccacctgcatatgttgcttgatcgccgcaatgcccggcaaaaatcgctcgcggttgaaaccctcggcatacagctggtcaggtggttggttggaggtgcagaccatcaccacgccttcatcgaacatcacctgaaacagccgcccgaggataatcgcgtcaccgatgtcattgacgaacaattcgtcgaagcacagcacgcgtactgcctggctcagctcccgggccagggcctgcaaggggtcgtgggtgccggtcagttggaacaggcgctgatgcacccactgcatgaagtgatgaaagtgctgacgccgcgctggcacctgcaggctttggtagaactggtccatcagccaggtcttgccccgacccaccgggccccacaggtacacgccggtgatcggtgcatggctgtggtgcagggcttcgtggcaggcttgcagggcgtccaccgcgcggcgctgagcggcgtcggcgacgaaacccggttgagcaacggcgtattggtaggcagcgaggggcgagtcgaaagtcatgcccgccagtatgaactacagcgaaatatccagccgcgaaatcttgccctgctcgttcaagcgaaaggtgtagcgcagctccaatgggctgcccgggaaattgccggacacgatattgctgaccagcaccttgccggtacggtgttgcaccttgagcacttcgacccgcggctggtaacgacgcccggtgtcttccatccagcgcgcaatggcggcagcgccgacctggtgctggccctcatcgaacacattggcatcctcggcaaaacactgggcgatagccgaggtgtcacgggtattggccgccgcgatataggccacgatggccggtgccaactcagggatagacatgacacagctcctttctgggtgatttgtagtgccatgctaagccagggttgtgtcagtttttgtcaggagtaaacggcccggattcgttctgttccatcaacttgcgccaggcccgcagccaatcgctgcgccgccccgggtaacgttcgccaagcacctgtgcactcgccacgcggtcggtgcgaaaggtgcgataggccccccgcaattcacaccaggccacgatcacccgtacttcattcagaaagcccagggccaggggccagatcaggcgttggctctgggtctggctggcgtcggcgtaatcgatctgcagcttggcctggttgcgaatggccccgcgaaacacgttgagcggcacacggttttccgggtaaccgaagccgggcggccccggcagcagcgtcgggttgcgcaaggcttcctgggcggcagggtcgagtacatcggcgatcttcgccagggcattggcggcagcgcggctgagcacgtcatcgccgcgctggtccacatatctcaagccgagcacgatagcttcggtttcctcggcgttcagcatcaagggcggcagaaacaagccactgcgcaacacataccctacccccgcctcaccaaaaatcggcgcgcccaaggccgtcaattcggcgatatcgcgatacagcgtgcgctcggacacctccaactgcgccgccagcacggcagcggtcaccggacgcttcttgccccgcagggcctggagcaaagtcagtagacgagtggtacgcgacacagggtttcccgccagaaaatggaaaagtgcagcagcatagcaaagccccctgtcagaaatcgtcagcagtaaaaaagtcgcttgacccgataaattatgcatatcatattaaatacatgttaccaaacatgtaagacaatcactgcctctggagtccttgtatgcgtaataaaatctttggccgccgcagcggcctgcaggtatctgaactggccttgggcaccggtaatttcggtacgggttggggccatggcgccgagcgcgacgaagccaaggcgatctttgatggttacctcgaagccgggggcaacttcctcgataccgccaacggttaccagttcggccaggccgaaaagctgctgggggaatttatcgcctcggaacgtgacaacctggtggtagccaccaagtacaccctgcgcaccgagccgtccgatgaaggcacgatccgcgtcggcaacaaccgcaagaacctgatgcgctcggtggaagaaagcctcaagcgcctgaacaccgagcgcatcgacctgctctgggcacatatgagcgacaacgtcacgcccatggaagagatcctgcgcggcctcgatgacctggtacgcgccggcaagatccactatgccggcctgtccaacttccccgcctggcgcattgcccgcgccgacctgctggccgacgtgcgcagcttcgcaccgatcatcggcgtccaggtggaatacagcctggtggaacgcagcgccgaccgcgagttgctgccaatggccgaagcgctggggctgggcgccacgctgtggtcccccctgggcggcggtttcctgaccggcaagtaccgcaacacccaggacgacaaccgcgccaacaaactcgggatcctggtgcacgccgaacacagtgcgcgtgaaaccgccgtgctcgacgcgttgctggcggtcgctggtgaaatcgacgccacgccgacccacgtcgccatcgcctggctgcgggaaaaggcccggcgctcgaccaccgcgctggtgccgatcctgggttcgcgcacccgcgcccagctggacagcacccttggcgcgttgaatgtgcaactgtcggccgatcacgtcacccgtctcgacagcgccagcgccatcccgcttggcgtgccgcacgggatcatcgcagagcgcttccccatcgataacggcctcgacaccgcgcgaccaccggttatctgaggcaaaaaaaacggcctgttcaacaggccgttttttattcaacgatgcaactcaggcaagactcttgctgaccacctcaaacacatcactcgacaaaccaccggacgccagaatccgctccagttcggctttcatcagcgcctggcgcgcgctgtcgtatttacgccagcgggtcagcggcgccaactggcgtgaagcgatctgcgggttgaagccattcaactggatcaccaagtccgccaggaaacgatagcccgagccatccgccgcgtggaagttgatcaggttctgcccggcaaaggcaccgatcaaggcacgcaccttgttcgggttcttgagtgtgaacgccgggtgctccatcaacgccttgacccgcgccagcccgcccggcaacgtgctgccagcctgcacgctgaaccactggtccatgaccagcgggttgtccttgaagttctcggcaaacaccgcaagcgccttggccttctctgcctcgaacggcgaattcaccagcaccgccagcgcggtcaggcgctcggtcatgttgtcgctggtgtcgaactggtccagcgtcgcggccaacacttgcggcttgccactgagcatcaggtacgacagcgcgatgttctgcaacgcgcgacgggcaaagtgctcggcggccgccacgtacggcgtttgtttggacagctcgcgattggactggtaacgcagccacaacgcttcgtgcaggttgtccgccagttgcttgcgcgcaaactcacgggcggcgtggatggcatccacatccgccacttcgctgatttcagtcaggtaggcttcacccggtaacgacagcatttccgccaccatcgcctggtctaggctttcatcactcaacacgctgcgcagcgcagtgatcaagcgctgatccatcttcaaggcctggccttgctgatgctggccaataagctcctgcaacacctgcaccgacaactgctggccggcatcccaacggttgaaaccgtcgctgtcgtgctgcatcaggaacatcaactggtcgcggctgtacgggaagctcagcttcaccggcgccgagaacccgcgcagcagcgaaggcaatggctgctcaggcacatcgacgaaggtaaacgtctgctcggcctcggtcaccgaaatcacccgcgacgtgccacccgcagccgcctcaccggccaggcgcaaggcaatgccagcgcccttcccgtccagcaagcccagctccaccggaattacgaacggcagtttttccaccttgtccggggtttgcgggcagctctggcggaaggtcaggctgtaggttttcgccgcggcgtcgtaggcctcgctcaccgccaggcgcggcgtaccggcctggctgtaccagcgcttgaactgggtcaggtcggcgccgttggcgtcttccatggccttgatgaagtcgtcgcaggtcacggcctggccgtcatggcgttcgaagtacaggtcgctgcctttgcggaagccttcggcgccgagcaaggtgtggatcatgccaaccacttccgagcccttttcgtacacggtcagggtgtagaagttggagatctcgataaagctgtccggacgcaccgcgtgggccatcggaccggcgtcttcggcgaactgatgggtacgcaggtacgccacgtcctggatacgcttgaccgtggccgagttcatgtcggcggagaattgcgagtcacggtaaacggtgaagccttccttgagcgacagctggaaccagtcgcggcaggtcacgcggttgcccgaccagttgtggaagtattcatgggcaacgatcgcctcgacccgctggtgcgcggcgtcggtggcggtttcggcgcgggccagcacggcgctggagttgaagatgttgaggcccttgttttccatggcgcccatgttgaaatcgttcaccgcgacgatcatgaagatgtcgaggtcgtactcacggccataggtttcttcgtcccagcgcatggactttttcaggctggtcatggcgtgctggcacttgtcgatgttttccggctcgacgtagatgcgcagcgccacggtgcggtcggtcatggtggtgaaggtatcttcgacacaccacaggtcgccggccaccagggcgaacaggtaagccggtttcttgaacggatcttcccaggttgcccaatggcggccgtcctcacccggaccgctggcgatcgggttgccgttggacagcagaatcgggtagcggtgctgctcggcgatcaccgtggtggtgaaggtgctcatcacatccgggcgatcgaggtaataggtgatcttgcgaaagcactcggcctcgcactgggtgcagaacatgctgccggacttgtacaggccttccagggcagtgttggtttccggatggatttttaccgtggtatccagggtaaacgtcgcgctttgcggatgcaccgtcaggtggctgtcggtcagctcgtagtcatcagcgctcagtgcctgatcggccaggttcacgctcaacagctccagctgctggccgtccagcaccaacggcggcaaaccggcgccgcgctcgggattgcggcgcatcaccagttgcgcgtggaccaggctgtggtcctcgaacaactcgaaggtcaggtgggtctcgtcgatcaggtagtccggcgcctgatagtccttgaggtaaatcatcttcggttgttcggtgcgcatgggtggcatccttctactgatgcacggcgagctggtaggccgtgtacttacgaatattgatcacgccggtatcgaagatcaggtactggcccttgatccccagcagcgtgccttcggcaatcgggttcttgtccaggttgaagctgacgatcttcgccggatactgctccaccgggtagcggatttcgagcggctcgatgtcggtgaccggttggatggcctgcaggccaaagcgttcctgcaaacccagcaggccgtcagcacaggcggcgaacagatggtcacgcacctgcttgaggtcgacggactgggcgtcgcccttgagcagcgcacgccagttggtcttgtcggccacttggctgcggaacaggtcttcgacaaaaccggactgctggcgggtagccacgcgcatgatcggcagcgcctggctcgcgccctggtcgagccagcgtgtcggcaactgggtggcacgggtgatgccgaccttgatgcctgacgagttcgccaggtacaccacatggtcggtcatgcagaatttctcgccccagcctggatcgcggcaggtgccggcgtcgtaatggcaacgctcggggctcatgatgcacaggtcacactgggccagctttgtcatgcacgggtagcaatacccctggctgaagctggtcttggtcttgcggccgcaatggctgcaatggatggcaccgaggtattccaggcgcacgtgggtgccgatcaacggattgaccggcacctcggcacttcctaagcgaaacgcgtattgaacggtcggctcaccgagttgcgccgacatcttgctgactgcaccgcgaccgatttcaatcaatggatcgcatccgacttgaacaggatgttcggcacggtggtcgatttcgactggcattcctgcgggcccatgtagccggtgcgctggtcttccggcaggttctggatttcccaggcgatcaccgcctgcaacgacagctcgcgctgctcggcggtgagcttgcggccatcggaccacttgccgatttccacggcgagcttgaggctctcgtagatgtccggggtgatgttttcgatcatttcagcaaaagacgacatgtgaacagcctctgaggttcagcgagtacgtgggtgacgggtcctggcccgtcagaattccttggagagcttgacctgtacaagctccttgtccaaaaggcgccggaagatctgcggcgcggcgaaggtgtaggcggcaaacgccagccacagccaattgatcagctcggccacttgcggatagccctgggcagtcaacgtgataaccacaacacggtagaccacaaacatgcacagcagcaggataatggcgcgggtggcgctgcgctcgttcatccagctattgaagcgccaccaggtgccgaggaacacattgctgcgggccttgaccgccgtgagcaggtgcagcgccgcaacgttcgtggcgttctcctgcaaggcccagatcgcatggtcacgggcgccgttgatatcgccttcgcgcaacaacaggtggccgagcaccaccactgccgccgcattcgacggatcagcctgcaacgcctggcgcgcgaactgatacgcctggtcccactggctgctggcgcggtggaactgcgccatggctaccaggttggcgggatcatcggggcccagttgcaaggctttttccagcggttcacggctttgcgctaggcgaccggtgagctggtacaactcggcctggcaacggtagtacgccgggttcagcggctccatgtccaacagctgggtgacatgttcctgggccagcttgaacttgcgcagggcaatcgccacctgcgcggcggcgtagtgggacagcggcaactgcgcatcggcggcaagcgccaactgcacctcgcgcttggcagcatgcacgcgacgcatattcatcaagcagatcgccagcaaggcatgcgcctcggccgagtgcgggtcgctggccagcaactggcgcagtgcgtcgatggcgccatcattgtggtcagcctgtaggcgttggtaagccagttgcagcagatagtcggtattcatcagctcaccaccaggtaccacagggtgtacggcagccatttgacgaccatgcctttgagcacgaagccaccaatcaacgccaagggaaaaccaaaacggctcaactcgccgccgtagtactggtaaatctcaatggttgcgttctgctgcatatacagcaggtagcccagggtgagtttccacaccaccaacaccagcaaggcgtactggatttgcgcctgggtctgcaaataccccgcgccaaccagttgcagcaacacgaagccgatgacgatgctgcccaccagcgccacgccggccagcacccattcgcgcacccgcgtcgggctgccgacggcaatggagttgaacacgaaccacggcaaacccagccaggcgccaccgagcatcaggccgagcagcggccagaatggcgaaaccgcccacttggccagagcgcccgggcgcggttcgtcttcgatgcgataaccaccgtactgcgccatcagcgacccttcccgtgcttgtcgaggaaagccagcacttcatcgtactggttgccttcattggcataccgcgcgtaattgcgcgccgtggtcagccattccagggtggtggcgcgcacctctttcaaggcttgcttgaaatgccggtcgcaaatcgactgctcggcgccactgtcgatggacgcttcaatggcttcatcggcggcggtttccaccaactcgctgaggtcggcaccggagaagcccgaggtgttcttggccaggaaggcgaagtcgatgtcgtctgccatcgggcggcctttcatcatcgccttgagcatcgcctcacgcgccgggcgatccggtggcggtacaaacagcacgcggtcaaagcggccggggcggcggaacgccgagtcgaccgaccagggcacgttggtcgcggcgaggatcagcacgccgtggttgtcattggtaaaaccgtccatctcggagaggaactggctcaccagcttggacgaggtcgactcgcgggtattcgcacgtttgccgcccagcgcctcgacttcatcgaaaaacatcaccgccggcgcctgggcccgtgcctgctcgaacagcgcgtgcaacttgcgctcggattcgccgatgtacatgtccagcacatcggaaatcgccacgttaaagaaggtggccttgcactccccggccgtggcgcgggcgagcatggtcttgccgcaacccggtggtccatacagcagcaccccgccgccgactttcttgcgaaagcgctggaacaggcccggtttctggtacggcaggatgatctttttgtggatggtctttttcaactcatccaggccgccgatatcatcgaaggtcagggtttcgttttccggcaccagcaggcgcacgacttcgctcttgtcggtgtcgtcattggagatcacacgcaggcgcgggcggccttcggcgccagggaagtccaccaccgacacattcaggcggcgccacagcgccatgtcttccagcgccgggttggcgtccaccgctgcgcggtattccacctgggcttccttgagacgctcgagtgcagccagggcacgggccttgagcaggcgcgccgtcgggtcttcaccctcgatcaacaacaacgccttctgcgcctggccgtcggccagcagcaattgcgccgccgccagcttcagcgccgaagcctctggccattgctcaaggtcggcgggcagcagcttcagcccacgcgcgtgttcgccacgctcaaggctggcgcccagcaacacggtcagcagtgcgacgttaccgggagccgcagccagcgcagcctccagttggtcgaacgtcgaatcatccatggaggttcctcaagagtgcatgtgcagcgcgcaggggctcatgtgagcacctccggtcgctcgacatcgacccacacgaacttgcgcgggtcgaggcgggtttcctggtccagacggtacgccaccagcttgccgtacagcaccgcgctgtagtccaggcaggccaggttcgggcggatcggcgccggtttgccgctgcgccagtaatgcccgacgaacaacagcggttcgtcgacgccgtagcgcagcagggaattcttttcggtggacgacaacggtgtacgcgccaccggctcgggcagtgcgtcaggctggaacacgatatcgccgtaggtcttggggtcgtcttcccagaacttggtgcggaagaacgagcgcgtcaggccatcgccaccggtcaacgtgaggccgtccggcaaacgcatgtcggtgccgcgcagcaggcggtcgaaggcgttgcaggcaaaactgcccggcacggccgcggcctgcaggaagtgctggtcgatgcagccgtccgggaaggtggcacgcagcggctggataaagccatcgtcccagcacgcatgcaccacgcgaaaacgcccggcgtcgacaaacagcggcatgtcgtagaaccagccgaggaagtcgtgccagtcggccgggtgatgttcgaactgggtcagggtctcgtggatcaaccgcgcatgccgtgggttgtgctcgcgcacgaactgcttgccactgcccggcggtgccggtgtggtccagcccagggcgttgaactcgtggttgcccatgatgcacagcgcatggccggcctcggccatgtcgtggacgatatgcagcgcctcgcggatgcgcgggccacggtcgatgatatcgccgaggaacaccgccatacgcgtgggatggcgccaggtgccgccctgcttgtggtagcccaacaggtcgagcaagtgctcaagggtgtgggcgcaaccgtgcacgtcaccaatcaggtcgtagctacgcgcgggatcgagcatcagtcgcctccaccccccaagcggctgccccagcccagcttggtgcggcacacttcgtagtagttgtggtccagcgggtggatcaaccgcaacttctgtgccttcttgctcacggtgatggtgtcaccgggggcgcaggtgaaatggttctgcccgtcacacgacacctgcgggtagatctgcatgtctttggacaccacgattttcagctcactgttgccgtcgaccacaatcggcctgctcgacaacatatgggggtacatcggcacgatcacaatggcatccagcttgggatgcatgatcgggccacccgccgacagcgcgtaggcggtggaacccgtgggcgtggcgacgatcaggccgtcggccttctggctgcacacgaactggccgtcgatatacagctcaaactcgatcatccgcgtcgacttgccggggtgcagcaccacgtcattgagcgcatcgccctggccgatggcctcgccatggcggcgtacttcggcttgcaacaggaagcggttctccaccaggtaatggccgtcgagcaccttggccacttcgacttccagctcatcggggcggatatcagtgaggaaccccaggctgccccggttgatccccagcaccggcacgttatgccgcgccagcgcacgggccgcgccgagcaggctgccgtcgccgccgaccacgatgaccatgtcgcagacttcgccgagcatcttgcgcgacgaggtctgcaggccatggcccggcaggatttcagcgatggtgtcttcgaggatcacatgcaggtggcggtccagcaggaattttttcagccggcggacggtgtccaacacctgggtactgcccaggcgaccgataatgccgatattgcgaaattgctccatggggctcctgcgggatgtggagtgtggcaaaaaagaacgattatgggcgaaaggccgtctcaggcaaaatcctttgtcgccgtgaagccttgatgacaacggttctcagccaccttcagcgcagttaaaaggctatgctcggaccatgactgtgttccccgatctgcacaacctgccccgccagctgcgccaccccgaggtgcgcgacctggcgtgggtgatgctcgccccgccgatgctcgcgcagacgccgtggccgcaacgccacccgctggccggcagcgattgggtgcaggcgccgcatctgttggaacgctggctgcgccagctggaccaggacagcagcgccttgcagcaatggttgagcctgtcgcgcacgcgccgcctgggcctgtattacgaacgcctgtggcagttcgccgtgcaacatgcgccgggcgtggaattgctggccgccaacctgccgatccgccgtgccgggcataccctcggcgagctggatatgctgctgcgtgaccgcgatggcgtgcatcacctggaactggcgatcaagctgtatctggggccgcaggacggtgaaggtcaggacaccgcacagtggctggggccgggttgtcatgaccgactggaccgcaagttggcgcatctggcccaacatcaattgccgatatccgcgcgggaggaaagccgtgaagtgctggccgcgttggatgtccagcagtttgatgcgcatttgtggttgggcggttacctgctctacccctggcccggccaggccatgccccccagtggcgcccatccgcagcatttgcgcgggcgttggttgcatcaacgggactggcaagcgtttgtcagccgcagccaaccgggccattggcagcccctgccccggcatgcctggctggcgccggcgcattaccccgcgaatgaggtgtggagcgaagagcagatgcacggctggctggccgaccttgacccgatggctccggcgcaactgctggtgcggctggtacaggtgggtgaggattgggaggaagccgagcggttgtttctggtggccaatctttggccgaatgtgccgggggctggctgaggttttgtcgtgaatttcagggcctcatcgggggcaagccccctcccacatttgaaatgcattcccctgtgggagggggcttgcccccgatagcagttgcccaggcactacagctgatcgatatgccgatactccaactgcaaccctgccgccagttgctgcgcgcgacccaacctgatcggcccacgctcgatatcgaccagcaggcccgggcactccaactgcggtagcccagtaacttccttgagtcgcccgtcagtgatcaccagtaaccgctgttgttcagccgggtagcgcttgcgccgcaatgccagccaattgccggcctcgacaagcgccgccagcaatggcgtaccgccgcccgcgcccaactgttccagccaacccgccaagcccttggccgctttcaacccttgcacctgccacttcggcatttgcccgctggccgtcaacaacgccatccgtgcccgctggcggtaggcgtcatcaaacaactgcgccaacaaacccttggcgtcggtgagtgctcgatgccgtcgggtggacgccgacgcatcgacaatcaccaaccacagttcatgggccgcacgactgcgcaggtgaaacagcaagtcctgtcgcgtttgtggccgaccaccgagcaaggtgcccggccagttgatcgcgccctgcttcgcgttgcgtgccttgccttgcctgccgttgcctagtcgccctgccttgggtcgcgcatccgcccccgcgtcaggtcgagggcgaatgcctagggcttttttggccaggtcggcacttcccggcgtgcgcccgtgggcagcgccggtgcgggcatatcgccccattggccttgaccggacgaggtgtcggagggtttcggcgactgcccttcgcttggcgggctggccggtggggactgttcctggcggcgatggcgcagggcgaattcggcaaccgcttgaatatcttcctcggcgatggcgctggctccccgccacgcggcatgggccctcgcaccgcgcaaccagacaaggtccgcacgcaggccatcaacccccgccgcaaagcagcgttcggtgatctgcgccagcgcctggtcatccagcgcaatgctgtcgagccgcgcccgtgcctgggtgcagcgctcgcgcaatgccgcttgtgacacctcccactgcgtgcagaacgccgcagggtcgctgtcgaaatccagacgccgccggatgatctgcccacgctcggccggcaaggtctgcccgctcaaggccacgttgaaaccgaagcggtcgagcaactgcggacgcaactcgccctcttccgggttcatggtgccgatcagcacgaagcgcgccgaatggcgatgggaaatgccgtcgcgctcgatcaggttggtgccgctggcggccacgtccagcagcaggtctaccagatggtcgggcagcaaattgacttcatcgacgtacagcacgccgccgtcagccttggccaacacgccaggggagaactgggcccggccttcgcccaatgcggcgtccaggtccagcgtgccgaccaggcgctcttcagtggcgcccaacggcaaggtcacgaactgaccactggccagcaggtcggccaaaccccgcgccagggtggacttggccatgccgcgcgggccttcgatcagcacaccgccaatcttcgggtcgatagcggtcaggcacagcgccagtttcaggtcatcggcgccgaccacggcggacagcgggaaatggggaatatcagtcatcagctgtcttcttctatatccagcaacaggttttccaacgcctcgcggtatgcccccggttcctgccacatgccacgctgctgggcttccagcatgcgctcggtcatgtcgcgcagtgcatcggggttgtgctgttgcacaaaggcccgggtgtcggggtcgagcaagtaggcgtcggccaacagtgcgtattggtgatcgtcgatcagtgcggtggtggcgtcgaaggcgaacagattgtccaccgtcgcggccatttcaaacgcacctttatagccatggcgcttcacgccttcgatccacttggggttggctgcacgggaacggatcacccggttcagctcttccttcaacgtgcggatcttcggcaggtcaggctggctatggtcgccatggtagctggcggccttgtcgccgctcagggtttccacggcagcgagcatgccaccctggaattggtagtaatcgttggaatcgagcaggtcgtgctcgcggttgtcctggttctgcaaaacggcctgcacctggctcaggcgctgggcgaattgcccgcgggcggcagtaccttcgtcggaaccgccataggcgtagccgccccagttcaggtaaacctcggccaagtcttcacggctttgccagagacgcccgtcgatcgcgccctgcacgcccgcaccgtaggcgccgggcttggcaccaaagatgcgccagccggcctgttttgccgcggcctctgcgtccaggcccgaagccagcaacgcttcacgctcactgcgcaccttggcggccagggggttcagatcgtccggttcgtccagcgcagccaccgcctgcaccgccgcatcgaacaggcggatcaggttggcaaaggcatcccggaagaaaccggacacgcgcaacgtcacatcaacccgcgggcggtcgagcaggctgatcggcaggatttcaaagtcatccacccgctggctgcccgtcgcccacaccggacgcacgcccatcagcgccatcgcctgggcgatgtcatcgccgccggtgcgcatggtcgcggtgccccataccgacaggccgagttggcgcaggtggtcgccatggtcttgcaggtgccgctccagaatcaggttggccgactggaaaccgatgcgccaggccgtggtggtgggcaggttgcgcacatccacggtgaaaaagttacgcccggtgggcaacacatccaaacgcccgcgactcggcgcaccactggggccagcgggcacgaaacggccgctcaaggcatccagcaatccgcgcatttccgccgggccacaggcatccagccgaggcgccacgacaatacgcaggctttcgatcacggccttcacgtcttcccagccgggttcctccagctgttcaagcggtccttccagggcttgctcgatcaaacgtgcggcgtacagctccaggcgctcgcgggtatcaccggcggtgcgccacaactgcccatcgatattctgcagcaccagcggccggcgtccggtccagggttcggccagggcgcagtccagcgggtcgaagcccagctcgaaggccttggccaacacgcgcagcaagctcgactgcgggcctcgaccatcgccacgcgggatgcgcagcagcgccagcaaggtgtcgatacgcaggcgaccctcgggtgactcgccaaaaatatgcaggccgtcgcggatctgcgattccttcaagtcgcacaggtaggtgtccaggcgcggcaaccacacggcagcatcggcgtcgctctccagctcaagctcctggtcgatgcgggtttcgcgcaccagcttgagaatgtccttctgcagctccagggcgcggcgcggatcgagcaactgcgcttcgtaatattcgtccgccagcagctccaggttacgcagcgggccgtaggtttcggcacgggtcagcggcggcatcaggtggtcgatgatgactgcctgggtgcgccgcttggcctgggcgccctcgcccgggtcattgacaataaacggatatatattcggcagcggccccagcaacgcatcgggccagcagttttccgacaggcccacgcccttgcccggcagccactccaggttgccgtgcttgcccacatggatcacgccgtgggcgccgtaggtgtggcgcagccagaagtagaacgccaggtaagcgtggggcggtaccaggtccgggtcgtggtacacggcgctggcgtccacttggtaaccccgcgcgggctggatgccgacaaacgtcaagcccaggcgcaggccggcgatcatcaggcgaccgtcgcggcacatcggatcgttctgcggcgcgccccagcgttccagcaccgcctggcgattggcttcgggcaggcgctggaacatcgtctcgtactcgtccaggcccaggctttgatggcaagggcgtaggtcgaggctgtccaggtcattggtgacgccgccgagcaactcatggatcaacgccgtgccgctgtcgggcaataagtccggcagcggatagccttcggttttcagggcacgcaggatattcagcgccgccgccggtgtatccaggcccacgccgttgccaatgcgaccgtcgcgggtcgggtagttggcgaggatcagcgcaatgcgtttctctgcattcggcactcgcgccaattcgacccaacgccgcgccagctcagcgacaaaatccatgcgttcgggcgcggcgcggtagcacaccacatccgactggctgcgctcactgcgccaggccaggtccttgaaactgatcggtcggctgatgatgcgcccgtccaactccggcaacgcgatgtgcatcgccaggtcgcgggggccaaggccctgctcgctggcctcccagccgggctggttatcctgggcacaaatggcctggatcaccgggatattgcggcgaaacgggcgcaggtgcggcgcttcggggctggattgggcgaagccggtggtgttcaagatcaccgccgcgccgacctcatccagcaggtcctcgaccaccgccaggcagccgggttctttcaaactggccaccgccatgggcaacgggttgaggcccgccgcctgcagacgctggcaaaacacatcgataaaaccggtattggccgcctgcaaatgggagcggtagaacaacaccgccgccaccggccagtcggcgttccagtctgcctgccaatcgttcaggcgggcgttggcatgctgcggatgatagatcgccgtgcgtggcagggtttgcggctcgccccaggcatagtcgcgacccaggtaagcgctggccaggcagcgatagaaatccagggcattgcccaggccgccctgacgcaggaagtgccacagccgatcacgttcttcggcaccgacggtgctcagcccgctgagttccgggtccgggcgatcatcccccggtaccaggatcagttgcacaccgcgttcggccagttccaccaggcgctcgatgccgtagcgccagtaaccgataccgccatgcagcgaaatcaagatgaccttggcgtggcgcagcacttcatcaacgtacaggtcgaccgaggcatggttctgcacctgcatcgggttggccaggcgcaggcttgggtagtcgtcgggcaactgctgggccgcttcggccagcagcgccaggctggaatcgccgctgcacaggatcaccaggtcagcggggctttggccaaggtcggcaatattatcgtccgagacgaaaccaccgggctgggtcctgagcaggtgcatgggtcagacgctgagggcggcgcgcagttgcgcttcgaggcccgccgcgtccagttcctggccgatcagcaccaggcgcgtggtgcgcgcttcttcagcgccccaggcacggtcgaagtgtttgtcgaaccgcgtgcccacaccctggatcagcaggcgcatcggtttgttcgggatggcggcgaaacctttgacgcgcaggatgccgtgttgcaccaccagttgcgtcagggcatcgagcagcagtgcttcatcggcttgcggcaagtcgatggagatcgagtcaaaggcatcgtggtcgtggtcgtcttcaccttcgtggtggtgatcgtggtggctgtggcggccgtcgatgtgctcttcggaaccggcgcccaggccgatcagtacatccaggggcaagcgaccgctgctggcttcgacgatcttcaccgccggcggcagctcttcggcgacttccaggcgcacgcgggccaggtcttcggcgctgatcaggtcggtcttgttaaggatcactaggtcggcactggccagttggtcggcgaacagctcgtgcagtggcgattcgtggtccaggttggggtcgagcttgcgctgggcgtccacctggtccgggaatgcggcgaaggtaccggcggccacagccgggctgtcgaccacggtgatcacagcgtcaacggtgcaggcgctgcggatttccggccactggaaggcttgtaccaacggcttgggcaatgccaggccggacgtttcaatgaggatatggtcgagatcgccgcgacgggcgaccaattcgcgcattaccgggaagaattcttcctgcacggtgcagcacaggcagccattggccaattcgtagacacgaccgttggcttcttcctcggtgcagccgatggagcactgcttgaggatttcaccgtcaatgcccagctcgccgaattcattgacgatcaccgcgatgcgacggccctgggcgttgtcgagcatatggcgcagcaaggtggtcttgcccgagccgaggaagccagtgacgatggtgacggggagtttggccagtgttttcatcggatgcccttgggggcgggcatacgggacgatggccctgcgacggtgcgcagcagcggatttcgtcaccggatcaccccgcccggttgaagtagaaaatcggttgcgaggcaggtctcctggcttggggcttgccggtcttgcgaccggcgctggctgcgccttcccgccttgtcggcagtggcgtggcagtcagctggaccctttacagttgcgggggcagccgcggcttggaccgcgttcccttcttagcttcggcctgggccgaagaacctcgagggtgcaaggctacgcagtgcttgggggatggtcaatgatggggttggttggcctgtgtacatatccgttgctgcggtaacggccgctattggttccgctcttacagcggctcacttttgaaaagccggaatgccggcccagtcaaaagtaagcaaaacgctcttaccccaacactcggtacctcgcctaggctcggtatgcccgtaatccgacagtgatttggggggccgccctagatcaaaatcaaaagcagatctagagccagagcaaaccacccttcaactgatacatgaagatcaaactgtgggagggggcttgcccccgatggcggtgtatcagccaactcatcagtgactgacccactgccattgggggcaagccccctcccacacttgaatgtattcacagatcaaaatgtgggagggggcttgcccccgatagcggtcttaagatcaatcaaggcgctgggttcgggtgatccttctgaatcgcctcaatcccttccaatacctctttcgacagtttcagatccgcactggcaatgttgctatccagttgctccagcgacgtggcaccaatgatattgctggtcacaaacggctgctgtgtcacaaacgccagcgccatctgcgccgggtccagcccatgttcccgcgccagtgcaacgtaacggctgcatgccgcttccgactgcgggttgaagtaacggctgaagcggctgtattccgtcagtcgtgccttcgctgggcgggcgccattctcatacttgccgctgagcatgccgaacgccaggggggagtacgccagcaggccgcattgctcgcgaatcgcgacttccgccaggcccacttcaaagctgcggttgagcaggttgtaggggttctggatcgacaccgcacgcggccagccgcgggcttcggccagggcgaggaatttcatggtgccccacggggtttcgttggacaggccgatgtgacggatcttgccggccttcacctgctcatccagcgcttcgagggtttcttccagcggggtgaggttgtcttcgtccttgtgcttgtagctcagttggccgaagaaattggtgctgcgctccggccaatgcaactggtagaggtcgatccagtcggtctgcaggcgtttgaggctggcatccagggcttcgacgatgtgcttgcggttgtggcgcaggtggccgtcgcggatgtagtcgatggtgttgccggggccggcgatcttgctggcgaggatccagtcggcgcggtcgccacggctcttgaagtaattaccgatgtaacgctcggtggtggcataggtgtcggccttgggcggcaccgggtacatttcggcggtgtcgaggaagttgatccccgcgcctttggcccgctcgatctgcgcgaaggcctctgcctcgctgttctgctcgccccaggtcatggtgcccaaggctatcgcgctcacgttcagatccgtacggcccagctgtcgataatccatcgggtactccttcagggaaaacaatcataaaagcaggttgaattttttttcgcaatctgcataattgcccacctctttctgcagtggaagtgatgcgccgcctgccgaagaatcttgccgttgaacggacgcgccgacccgagcccccgatagcgtctgtatccggctgcctttgacttgtcaaagtacgcactattcagtaagatccgccgtctaatttacagggcggcccctgaggctattaaagaatgacaacttttactgcaaaaccggaaacagttcagcgcgactggtttgtcgtcgacgccgctggtcagaccctgggtcgtctggccactgaagtcgccagccgtctgcgtggcaagcacaagcctgagtacacccctcacgttgacaccggtgactacatcgtgatcatcaacgctgagcaggttcgtgtaaccggcaacaaagcaagcgacaaaatgtactaccgtcactccggtttcccaggcggtatcaagtcttccaacttcgaaggcctgattgccaagaagcctgaagccccgatcgaaatcgcggtcaaaggcatgctgcctaagggcccactgggtcgcgatatgtttcgcaagctgaaagtctatgcgggcgctgtacaccctcatgctgctcagcagccccaagaactgaagttttaacggaatagttcattatgtcggcgactcaaaattacggcactggccgtcgcaaaaccgcaaccgctcgcgttttcctgcgtccgggtactggtaacatctcgatcaacaaccgctccctggacaacttcttcggccgcgaaactgcccgcatggtagttcgtcagccgctggaactgaccgagaccgttgaaaagttcgacatctacgtcaccgttatcggtggcggtgtaagtggtcaagctggcgcaatccgccacggtatcactcgcgctctgatgcagtacgacgaaaccctgcgtggcgctctgcgcaaagctggcttcgtgactcgcgatgctcgtgaagttgaacgtaagaaagtcggtctgcgtaaagcgcgtaagcgtccgcagtactcgaagcgttaattcgctttacgttccacaaaaacgcccagcctcctcacggagctgggcgttttttattgcctgcgatttatgcagaaaaatcgccgtgacaacttgccacatccgtagaccccctatactacaaggcctggaggcggagccccgggcaattcccttgtcagacgtggggcttttcattaccattcggcaaaatttttataagtaaagattcaacacttagtagacgcctgatttaacaggccaaaaagctgatgggagaggactgaatgagcaatgacggcgtgaatgcaggccggcgtcgcttcttggtagcagccacatccgtggtgggtgctgcaggagcggtgggggctgcggtcccgttcgtggggtcatggtttcccagtgccaaggcgaaagccgcaggtgcaccggtgaaggtgaatatcagcaagatcgagccaggccagcagatgattgctgagtggcgcggccagccggttttcattgttcgtcgtaccgaggaaatcctgggaaatctcaagaagatcgaaggccagttgtctgaccccaaatccgagaaatccgaccaacccgcctacgccaagaatgaagtgcgttcgatcaagccggagatcctgctgctggtcggtctctgtacccacctgggttgctcgcctaccttccgcccggaagtggccccggtcgatctgggcaaggattgggtcggcggttatttctgcccctgccacggctcccactacgacctcgctggccgtgtctacaaatcccagcctgctccgctgaacctgccggttcctccgcatacctacgaaactgacgacctcattgtcattggcctcgataaggagaacgcgtgatgagcaagttcatggattgggtggatgcgcgcttccccgccactaaaatgtgggaagaccatctcagcaaatattacgcgccgaaaaacttcaacttcttctacttcttcggctccctggccctgctggtgctggtcaaccagatcgtcaccggcgtctggctgacgatgagctatacgccgtcggcagaagaagcgttcgcttccgtcgagtacatcatgcgtgacgtcgagtacggctcgatcctgcgcctgctgcactccaccggcgcctcggcgttctttatcgtcgtctacctgcacatgttccgtggcctgctctacggctcgtaccagaagcctcgcgagctggtgtgggtgttcggcatgctgatctacctggcgctgatggccgaagccttcatgggctacctgctgccgtggggccagatgtcgtactggggcgcccaggtgatcatctcgctgttcggtgcgatccctgtgatcggcaacgacctgacccagtggatccggggcgactacctgatctccggcatcaccctgaaccgcttcttcgccctgcacgtggtggccttgccgatcgtgatcctgggcctggtggtgctgcacatcctggcgttgcatgaagtcggctccaacaacccggatggcgtggacatcaagaagcacaaggacgaaaacggcatcccgctggatggcattccgttccacccttactacaccgtgaaagacattgtcggcgtggtggtgttcctgttcgtgttctgctcgatcgtgttctttttcccggagatgggcgggtatttcctggaaaagcctaacttcgaacaggccaacgccttcaagacacctgagcacattgccccggtgtggtacttcacgccgttctacgcgatcttgcgcgcgatccccgacaaactcatgggcgtgatcgccatgggcgcggccattgctgtgctgttcgtgttgccctggctcgatcgaagcccggtcaagtccatgcgctacaagggctggctgagcaagatctggctgtgggtgttctgcattgcgttcgtgatcctaggtgtactgggcgtattggcaccaacccctgagcgtacgttgctgtcgcaggtctgcaccttcctgtacttcgcctacttcattctgatgccgttctacacccggctcgagaagaccaaaccggttccggaaagggtgactggctgatgaaaaagttatttgttgctttgatgcttgcggccctgccgctcctgtccttcgccgccgaacacggtggcccggcgctggaaaaagtcgatatcgacgtgtctgacaaggcagccatgcaagacggcgcgcgtacgttcgccaactactgcatgggttgccacagcgccaagttccagcgttacgagcgggtggccgatgacctcggtatcccccatgaaatgatgctggagaagctggtattcaccggtgccaagattggcgaccacatgaccatcggcatgaagcccgccgacgccaagacctggttcggcgcggcaccgcccgacctgaccctggtggcacgtgtacgcggcaccgattggctctacggctacctgaaatccttctacgaagacccggcgcgcccttatggcgtgaacaaccgtgtgttcccgaacgtcggcatgcctaacgttctggtcggcctgcaaggcaagcaagtggtaggatgcaagcagattcaggtcgttgaagacggcaagaagcaatacgatccgttgactggcacgcctttgactcatgaagcgtgcgatcaactgaagatagaagccccaggttcgttgacagacgagcagttcgacgagaaggtcaagaacctcgtgaccttcctggcctactcggccaacccggtcaaactgcagcatcagcgcatcggtacgtatgtgttgctgtacctggccttcttcttcgtattcgcctatctgctcaaacgcgaatactggaaggatgtgcattgatccaaccgtaagcaattgctgttaatcttgcgcgcccagcggcatctctgaatacgtagcggtctggttgtaccaggcgttacagagatgctctctgggcgcgctcgtttttgagctttcgataatttcaacaagcgaggaggaccgccatgggcgtgaccaaccggttggcctgttactccgaccccgccgaccactattcccaccgagtacgtatcgtgctcgcagagaagggtgtcagcgccgagatcatcagtgtggaagcaggtcgtcatccacccaaactgatcgaagtgaacccctacggcagcttgcccaccctggtcgatcgtgacctggcgttgtgggagtcgaccgtcgtgatggaatacctggatgagcgttacccgcatccacccttgctgccggtgtacccggtggcgcgtgccaacagccgcctgctgatccatcggatccagcgtgactggtgcgggctggtggatgtgatcctggatacccgcagcaaagaagcggcacgtgtacaggcgcgtaaggaattgcgcgagagcctgaccggcgtttcgccgctgttcgccgataagccttttttcctcagtgaggaacaaagtttggtggattgctgcctattaccgatactctggcgtttgccgattcttggtattgaactgccgcggccagccaagccgctgcttgattacatggagcgccagtttgcgcgtgaggctttccaggcgagtctgtctggtgtcgaacgcgatatgcgctaaggcttaaggagccgctgatgaactccagtcgaccctacctggtccgcgcgctctatgagtggattgtggacaacgattgcaccccgcacatgctggtcaattcggaatttcctgcggttcaggtaccgcagggttttgccagcgacgggcagattgtgctgaacgtatcacccagtgccgtacgccatctgcacatggacaatgaagcggtcagcttcgaagggcgtttcggcggtgtgccgcatacgctgtacgtgccgattggcgccatcctcggcatctatgcccgggagaacggccaaggcatggtgttcgatctggagtcgcctttcgaggacgacgaatcgatcgaaagcgaagagggtgatgatcagccgccaccagactccgagccaccgcgccccagcggccggccgagcctgaaagtggtgaaatagccggcgttcccctcggggttagccgaaaaaaagcctcgacctgtgtcggggcatttttttgcgcgaaggatgtagatgaaagtcgcgcccggacggtgatcgtacaaccaccatgggctatgatgcgtgctcaagttcgccgagaaagatgattcatcatggaaaacgccaacaccgcccctcgtcttccccgcaagcgccgcagccttgcccaggaattggtcacggtgttgtccgagcagatccgcgacggccagctcaagcggggcgacaaactgcccaccgagtcggcgatcatggacgcccatggcgtcagccgcacggtggtgcgtgaagccatctcacgcttgcaggcggcagggcaggtggaaacccgtcatggtatcggcacctttgtgctggacacgccgagcccgagcggctttcgcatcgacccggctaccgtggtgaccctgcgtgacgtgctagcgattctggaattgcggatcagcctggaagtggaatccgccggcctggccgccttgcgccgcagcgatgaacaactggccgccatgcgtgcggcgttagatgccctgaatgaaagcgcggcccacgccggcgatgcggtggcctccgactttgccttccacctggaaatcgcgctgtccaccggcaaccgctacttcaccgacatcatgacccacctgggcaccagcatcattccgcgcacccgcctgaattcggcgcgcctggcccatgatgaccagcagcactacatgagccgcttgagccgtgagcacgaagagatctatgaggcgattgcccgccaggattcggatgcggcgcgggcggcgatgcgcttgcacctgaccaatagccgcgagcggctgcgccatgcccatgaagaggcagaggcgcagcgcatctagaagtgctgcctgtaggcgcggttgtcagtttgtcggggtgtttggcttgtagtccttgagcagcaggtaagtgctccacccccaccaatcattcgtccagcgcttgtcgttcaggtcattcacatccttgcggcgcagcaccttgtctccctccatcttgaacagcggcgaaaagttgttcgccgggttctgtgccgcattcaggtcgggcacatacagcggtgccttgaagttggccggggagggcgcggcaccactgataaacgtatcgaagatctcatcggctgaagcttgcaccgcacgtttgacctgcatccggttgtccgcatcgatatcatcgaagtagcgcttgtccccatacgcgtgccattgatcgcccagggcattgcgcactttcagcccgaatttgctgtcttcatcgtgcatgaagcggctgatcagcgaacccagttcaccgggtgtcaccaccgctgccagttgtttgcgcggtacacgcaagtggcctgccgaaaacagatcggtcaaaaagtgatcagcaaagctgttcatggcataggccagttccagcgcctggtcggtaccgatctggtgcgccacgacggcttgttgcagcgccactgtgtgccccgccaggtacgcggacagcgcccattcgccgaagtggtcggcattgtctgccgccagcttcaggtagcggcccagtgggatcagcgctgacaccgcactgccaccgccggtgatgcggttccattcctcagacaacgtatcacccaaggcgtcgtaggcttcatgggcctgcttgccatccttgatcgcttgcttgactgcattgatctccttttgcatcaccgcgaggatcttgtgcgcttcttcccgcgaggcgggtagcgcggcgagcgtgttgaaagcagcggaaaagcgttgcacacgttcggcaggggaggcgccatcactgatgggctggccggggatgccatagaagtcgccgcccaaggcaatgatctggccataggtcaacgccagcccgttgggcaggtgcagctcgacttggcgggcgggaattgccggggcgtccttggcgaagcgcagtagcgtgtcgtcgccgatggcggtgtgttcacccccttcgaaacgcaggacaggtggttttttttcggatactgcgagatcaagacctgacatgttagctccttgctatgtcgtaggaatcttccttaattactgtatgtatatacagttttatcgagcatagagtaaaaacttcctacgtcaagacggtgctcttcaacccctcgttgaatgaagtctgatgaattgcagttgacgaatctttttatagttgtacgatgacgtacgacatcaccaaaaccaacaacaacctttcgatagaaagtcttcgcccagggtgttcgaataatgaatccacaagaactgaagtccatcctctcccacggtctgctgtcttttccggtgaccgatttcaatgcccagggtgacttccaccaggcgggctacatcaagcgcctggaatggctcgccccttacggcgccactgccttgttcgctgccggcggcaccggtgagtttttctccctcgccgccagcgaatattcccaggtggtgaaaaccgccgttgatacttgcgctaccagcgtgccgatcctcgccggtgtcggcggttcgacccgccaggccatcgagtacgcccaggaagccgaacgcctcggcgcaaaaggcctgctgctgctgccgcactacctcaccgaagccagccaggacggcgttgccgcccacgtagaagcggtgtgcaagtcggtcaaaatcggcgtggtggtctataaccgcaacgtctgccgcctgactgcgccgctgctggaacgcctggccgagcgctgcccgaacctgatcggctacaaggatggcctgggcgatatcgaattgatggtgtcgatccgccgtcgcctgggtgaccgtttcagctacctcggcggcctgccgacggcagaggtttacgccgctgcctacaaggccctgggcgtgccggtgtactcctcggcggtgttcaacttcatcccgaaaaccgcgatggatttctaccacgcgattgccaaggacgatcacgccaccgtcgccaggatcatcgacgacttcttcctgccgtacctggatatccgtaaccgcaaggccggttacgcggtaagcatcgtcaaggcaggtgcaaaaatcgccggctacgacgcaggcccggtgcgcacgccgctgaccgacctgctgccggaagaatacgaagccctggccgcgctgatcgacaagcaaggcgcgcaataacctatctacaaggccgctgagcaatcagcggccttttgcgtcaggagaagatttgtgtcccaagcccaacgtttcgataactacatcaatggccagtgggtggccggtgccgactattgcgtcaacctcaatccgtcggagttgtccgatgtcattggcgaatatgccaaggctgatgttgcccaggtcaacgctgccatcgatgctgcccgtgctgcatttccggcctggtcgacgtccggcatccaggcgcgtcacgatgccctggataaagtcggcagcgaaatcctcgcccgccgcgaagaactcggcaccctgctggctcgcgaagagggcaagaccctgcccgaagccatcggcgaagtgacccgcgccggtaacatcttcaagttcttcgccggcgaatgcctgcgtctgtccggcgactacgtgccgtcggtacgcccgggcgtcaacgttgaagtcacccgtgaagccctgggtgtggttgggctgatcacgccgtggaacttcccgatcgctatccccgcctggaagatcgccccggccctggcctacggtaactgcgtggtgatcaagccagccgagttggtgccgggctgtgcctgggccctggcggaaatcatttcccgcgccggtttccccgccggtgtattcaacctggtgatgggcagcggtcgcgtggttggcgacgtgctggtcaacagcccgaaggtcgatggcatcagtttcaccggttctgtgggtgttggacgccagattgccgtcagctgcgtctcgcgccaggccaaagtgcagttggaaatgggcggcaagaacccgcagatcatcctcgacgacgccgacctcaagcaggccgtcgagctgtcggtacagagcgcgttctactccaccggccagcgttgcaccgcttccagccgcttgatcgtgaccgccggcatccacgaccagttcgtcgcggccatggccgagcgcatgaagtcgatcaaggtcggccatgcactcaagagcggcacggacatcggcccggtggtttcccaggcccagttggaccaggacctcaagtacatcgacatcggccagagcgaaggtgcgcggctggtcagcggtggcggcctggtgacctgcgacaccgaaggctactacctggcaccgacgctgtttgccgacagcgaagctgcgatgcgtatcagccgtgaagagatcttcggcccggtggccaacgtggtgcgcgtggcggactacgaagcggcgctggccatggccaacgacaccgagttcgggctgtcggcgggcattgccactacctcgctcaaatacgccaaccacttcaagcgccactcccaggccggaatggtgatggtcaacctgccgactgccggcgtggattaccacgttcctttcggtggccgtaagggctcatcctatggttcgcgtgagcaaggtcgctatgcgcaagagttctacaccgtggtgaagaccagttacatcggttcgtaacacgcatcactttgtgggagccggatgcctgccggctcccacattaaaaacagaaaaccattacccgcaaaaaaaataattagtgggagtacttctacatgcaagcgaccaagccgacccacgtccgctatttgatcctgctcatgctgttcctggtgaccacgatcaactacgccgaccgggccaccatcgccatcgcgggctccagcctgcaaaaagacctcggcatcgacgcggtcaccctcggttatatcttctccgcattcggttgggcctacgtggccgggcaaattcccggtggctggctactggaccggttcggctcgaaaaaagtctatgccttgagcatcttcacctggtccctgttcactgtgctgcaaggctatgttggtgaattcggggtctccaccgccgtggttgcgctgttcatgctgcgtttcatggtgggcctggctgaggcgccgtccttccccggcaacgctcgtattgtggccgcctggttcccgactgctgagcgcggtacggcgtcggcgatcttcaactcggcgcaatactttgccaccgtgctgtttgcgccgctgatgggttggatcgtctacagcttcggctggcagcatgtgtttatcgtgatgggcgtgatcggcatcattttctcgctgatctggctgaaagttatccacagcccgcgccagcacccgatgatcaacgaagctgagttcaaccacatcgcggccaacggcgccatggtcgatatggaccaggacaaaggcaagggtaagaaaaccgatgggccgaagtgggattacatccgccagttgctgaccaaccgcatgatgctcggcgtgtacctgggccagtactgcatcaacggcatcacctatttcttcctcacctggttcccggtgtacctggtgcaggaccgtggcatgaccatcctcaaggccggtttcatcgcctcgttgccggcgatctgcgggtttatcggtggcgtgctcggcggggtgatttccgactacctcttgcgcaagggccattccctgactttcgcgcgcaaggcgccgatcatcggtggcctgctgatctccagcagcatcgtggcctgcaactacgtggatatcgaatggatggtggttggcttcatggccctggccttcttcggcaagggcgttggcgcactgggttgggcggtggtgtccgacacctcgccgaaacaaatcgccggcctcagtggcggcttgttcaacaccttcggtaacctggcgtcgatcaccacgccaatcgtcatcggctacatcatcagcaccaccggctcgttcaagtgggccttggtgttcgtgggtgccaacgccctggtggcagtgttcagctacctggttatcgtcggcccgatcaagcgcgtagtactcaaagagccgccaagcaaggggcctgagttgaccaacctaaccgaagcgcattcctgaggggcgatgtaatgcagttgattgaacatgccgactcgccgcgctcgattcgtttgcacgagcgcgacaacgtagtgatcgtggtcaatgaccagggcgttccggccgggaccgagttcccggacggcctggtgaccgtggatttcatcccccagagccacaaagtgaccctggaagatatccccgaaggcggccagattattcgctacggccagaccatcggttacgccctggcgccgattccacgcggcagctgggtgcaggaggatcaactgcgcatgcccaccgcgccaccactggacagcttgccgctgtccaccgaggtgcctgaaacccaggcgccgctggagggctttaccttcgagggttatcgcaacgccgatggcaccgtgggtacgcgcaatatccttgggatcaccaccacggtgcagtgcgtcacgggcgtgctggaccatgcggtcaagcgcatcaaggatgaattgctgcccaagtacccgcatgtggatgacgtggtggcgctgacccacagctatggctgcggcgtggcgatcaccgcgacggatgcctacatcccgatccgcaccgtgcgcaacctggcgcgcaaccccaacctcggcggtgaagccctggtgatcagcctgggctgcgagaaattgcaggccgggcaggtgatgcacgacaacgacagctcggtcgacctgagtgagccctggctgtatcgcctgcaggactccagccacggttttaccgaaatgatcgagcagatcatggagctggccgagacgcgcttgaagaaactcgaccagcgccgccgcgaaaccgtgccggcgtccgagttgatcctgggcatgcagtgcggcggcagtgatgcattctccggcatcaccgccaacccggcgctgggctatgcctcggacttgttgctgcgggcgggggcgacggtgatgttttctgaagtaaccgaagtccgcgatgccatctacttgttgacgtctcgcgctgaaagcaaagaagttgcccaggagctggtcagggaaatggattggtacgaccgttacctggccaagggcgaggcggatcgcagtgccaacaccacgccgggtaacaagaagggcgggttgtcgaacatcgtcgagaagtccttgggctccatcgtcaagtccggtagcagtgcgatcaacggtgtgcttggcccgggtgaacgcttcaagagcaaaggcctgatcttttgcgcgacgccggccagtgactttgtgtgtggcaccttgcaactggcggcggggatgaacctgcatgtgttcaccaccgggcgtggcacgccttacggcctggcgatggcgccggtggtgaaggtgtcgacgcgcacggagctggcgcagcgctggccggacctgatcgatatcgatgccgggcgcattgccaccgggcgtgcgaccatcgaggagctggggtgggagttgttccacttctatctggatgtggccagcggcaagaagcagacgtgggcggaacaccacaagctgcacaacgacatcaccttgttcaacccggcgcctattacctgagaccgagtcgcctgcatcgggggcaagccccctcccacattttgaacggtgagcaccgtcagaggtgggagggggcttgcccccgatagcggtagaccagacgaagcggcctacactggcttatcattagccacctaacgacgctcaccaaggttctccccggcatgctggcaattttcctctccaccctcaccatcaccgcgccggtgtttgccatgctgttcctgggtgtgttgctcaagcgcatccactggatcaacgataactttatccacacggcctcgtccctggtgttcaacgtcaccatgccggcgttgctgttcctcggcattctgcatgccgacctgcacgcggcgctcaagccgggcttgctgatctattttgccgtcgccaccttgctcagctttgccctggcctggggttgggcgatctttcgttgcccgcgtgaagaccggggcatctacacccagggggcgtttcgcggtaataacggtgtaatcggcctggcgctggccgccagcatgtacggcgactacggcatctccctcggcgcgatcctcgcggcgctggtgatcctgttctacaacacgctgtcgaccatcgtgctggcggtgtacagcccggtgatcaagtccgacccatggagcatctgcaagagcgtgctggccaacccgttgatcatcagtgtgatcgcggcggcgccgttcgcctatttccagatcggcctgcccggctggctggaaaagtccatgcagtacctggcggacaccactttgccgctggcgttgatctgcatcggcggcaccttgtcgctggcggcactgcgcaagagcggcaacatggcgctgagcgcgagcctgatgaagatggtctggctaccggtgatcgccaccctgggcgcgtggctgctgggctttcgcgggccggagttggggattctgttcctgtacttcggcgcaccgacggccgcggcgagcttcgtgatggccagggcggccgagggcaaccatgaactggcggcggcgattatcgtgatcaccaccttgatggcggcggtgaccacgaatatcgggatctttgtgttgcaggcgggtggttggatctgaacgttcgggtgcctgtgagggccaatcgggggcaagccccctcccacattggacggggaatacattcaaggtgggagggggcttgcccccgatagctatctgaccgtcactgctgatctgtctgatacgcgtcgatcacttcctgggcggcacggaacgcatcaatcgctgccggcacaccggcatacaccgcgcaatgcagcagtgcttcgcggatttcctccacggtgcaaccgttgttcagtgcgccgcgcacgtggcccttcagttcctgtgggcacttgagcgcggtcagggcggcgagggtgatcaggctgcgggtcttcagcggcaatccttcgcggttccacacgctgccccaggcatgttcgttgacgaaatcctgcagtggctggctgaactcggtggcattgcccagggcgcggtcgacgaacgcatcgcccatgacctgacgacgcatttccaccccgggcttcttctgatcggtcattgcggttccctcttgtgttggcggcgccaggctcgcagcgtgctgaacaacagaaaagccaccagcactggcaggacgtaatacagcatcagttgttcaagcttgttggccaggggcatgcccgtggtgaacgccatcacatgcagcccgtacgccaggtacaggcccagcagcaccaggccttcggcgcgggtcacgcggtaaccggtgtagaacaccggcaggcacagcaccaccacgccgagcatcaccggcaggtcgaaatccagggcgttgggtgataccgacagcggtgatggcgcgagcagggcggtcaggcccaatacaccgagcaggttgaacaggttgctgccgatcacgttgcccacggcaatgtcacgttcgccgcgcagggcggcgatcagtgacgtggccaggcagggcagcgaggtgccgacaccgatcagggtcaggccgatcacacgctccgacaggcccaggtcgctcgccacgtccaccgccgcgcccaacagcaaatgcccggccagtaccagcaccagaaaaccgccgagcatcaacagcacgctgctcagccagggcgcgctggccaccgtatccagcgtgcgcgggcggcgggagtggcgcgtctggtagtgcaatacgccgaggtaagcgagcagggcaacgagcagcatcaggccgtcgctgggcgtgagttcttcgttggccgccagggtgaacaccagcagcccggccaggatcatcacggggatgtccaggcgcaccaattggcgtgagacccgcagcggaacaatcaacgccgacaggcccagggtcaccaggatgttgaagatgctgctgccgatcacgctgcccacggcgatatcggtattgccggccagggtggcttgcaggctgacagtcatctgcggcgcgctgctgccgaaggcgacgatggtcaggccgatgatcagtggccgcactttgaggctcgcggccaggcgcacggcggcgcgcaccaggatttcggcaccgaggatcagcagcaccaggccgctgaccaattccagcaggctccagggcgagagggcggttaatccgaaaatggccagggctccgtcttcaattgctcagggcttgcacgcgaacccgcgccgtaccgctgctgatcatacccagctgttcggcagccttgcgtgaaagatcgatcaagcgcccacgggtatgcgggccgcgatcattgatgcggacaaccacggatctgtcgttgtcgagattggtgaccttgacctgggtgccgaagggcaggcgccggtgggcagcggtcatggcgttctggttgaagggttcaccgctggcggttttgttgccgtggtgtttggcgccgtaataggaggcggtgccggtttcgtcgtagccgttggggtcgatgaggccgctggcgcagccggccaacagggagaacagggccaggaggccgagtagacgcttcattcaaggtttccccatgtcaaaggtagaatgaacttatgtgggagggggcttgcccccgatagcggcgcatcagccagacattcgtcagctgacactctgcaatcgggggcaagccccctcccacattggtccgagccgagcatgaaacctgactcggacccttcatcgctatcagccttcgagcttgcttttcagcagttcgttcacctgttgcgggttggccttgcctttggaggctttcatcgcctggcccacaaagaagccgaacatcttgccgcgcttggcttcgtctgccgcacggtattgttcgacctgctcggcgttggccgcgagcatttcatccagtacggccgagatcgcgccgctgtcggtgacttgcttgaggccgcgcttctcgatgatctcgtcggcactgccttcgccactggccatggcttcgaacacggtcttggcgattttgccggagatggtgttgtccttgatgcgcagcagcatgccgcccagctgctcggcgctgaccggggcttcgtcgatttccaggccctgcttgttcaacaggctgcccagctcaaccatcacccagttggccgccagcttggcgtcaccggcaatgctcacgactttttcgaagtagtcggcttgctcacggctggacgccaggacgctggcatcgtagaccgacaggccgaactgctcctggaagcgctcgcgtttctgctgcggcagttccggcagggtggcgcggatgtcgttgaggaacgagtcctccagcaccaccggcagcaggtccggatcggggaagtaacggtagtcgttggcttcctctttgctgcgcatggcgcgggtttcgtctttgttcgggtcgtacaggcgggtttgctggatgaccttgccgccgtcttcgatcagctcgatctggcgacgcacttcgctgttgatcgccttttcgatgaagcggaacgagttgacgttcttgatctcgcagcgggtgccgaattcgacctggcctttgggccggatcgacacgttgcagtcgcaacgcagcgagccttcggccatgttgccgtcgcagatgcccaggtagcgcaccagcgcgtggatcgtcttgacgtaggctacggcttccttggcgctgcgcatgtccggctcggagacgatctccagcagcggcgtgccggcacggttcaggtcgataccggtcgcgcccgggaattcttcgtgcaggctcttgccggcgtcttcttccaggtgcgcacgggtcacgccgacgcgcttgatggtgccgtcttccagcgggatgtccaggtggcccttaccgacgatcggcaattccatctggctgatctggtagcccttgggcaggtccgggtagaagtagttcttgcgcgcgaacacgttgtgctggccgatctcggcgtcaatcgccaggccgaacatcaccgccatgcgcaccgcttcctggttcagcaccggcaatacgccgggcatgcccaggtcgaccaggctggcctgggtgttgggctcggagccgaacgtggtggcgctaccggagaaaatcttcgattgggtggcgagctgggtatgaatctccagcccgatcacgacttcccattgcatagtgttctcctcagaagccggtaggggtgcgagtgtgccagtcagtgttcaactggtactggtgcgccacattgagcaggcggccttcctggaaatacggggcaagcaattgcacgccgaccggcaggccatcgacgaagccagcgggcatggacaagcccggcaggcccgcgaggttggcggtgatggtgtacaggtcttcgagatacgcagccaccgggtcgccgttcttggcgccgagtttccaggccgggttcggcgtggttgggccgagaatcacgtcgacctgttcaaaggcggccatgaaatcgtttttcaccaggcggcggattttctgcgccttcaggtagtacgcgtcgtagtaaccggccgacagggcgtaggcgccgaccatgatgcggcgctgcacttcggcgccgaagccttcgccacgggagcgtttgtacaggtcggtgaggtctttcgggttttcgcagcgatagccgaaacgcacgccgtcgaaacgcgacaggttcgaagaggcctctgccggcgcgatcacgtagtacgcagggatcgcgtgctggttgtttggcaggctgatttccttgatcacggcgccgagcttttccagctccttgacgctgttgtgcaccagctcagcgatacgcgggtcgaggccggcgctgaagtattccttcggcacgccgatgcgcaggcccttgagcgaggcgttcaggctggcgctgtagtccggcaccggctcatcgatgctggtggagtcctgtttatcaaaaccggccataccttgtaacaaaatcgcgcagtcttcagcggtgcgggccagggggccgccctgatcgaggctagacgcataggcgatcatgccccagcgggaaacgcgaccgtaggtcggcttcaggccggtgaggttggtgaacgcggcaggctggcggatcgaaccaccggtatcggtggccgtggcggccggcaggaagcgcgcggcaacggcggcagccgagccaccggacgaaccgccgggcacgtgctccaggttccacgggtttttcaccgcgccgtagtagctcgactcgttggccgaacccatggcgaattcgtccatgttggtcttgcccagggtcacggccccggcggcggccagcttggacaccacggtggcgtcgtagggggctttaaagttgtcgagcatcttcgagccgcagctggtgcgaatgccctgggtgcagaacaggtccttgtgggcgataggcgcgcccagcagcaggccattttcaccgttggcgcgacgtgcgtcggcggccttggcctggctcaaggccagctcttcggtgaggctgatgaagctgttgaccttcggatcgtgctcggcgatacgcgccagcagggtcttggtcagctcttcggaagaaaactttttgtcggcgagaccgcgcgcgatctcggccagagtcatgtgatgcattgcaggctctttccctttagtcgatgactttcggaaccaggtacaggccgttttcgaccgctggcgcgatggactggtaggcctcgcgattattactctcggtcacgacgtctgcgcgcaggcgctggctggcttccagcgggtgagccaggggctcgatgccgtcggtattcacggcttgcatttggtcgaccagcccgagaatgctgttcagggcgtcggtggtctgtggaagatcgccttcattgaggcccaggctggccaaatgagcgattttttccacgtcggagcgttcaagcgtcatgggaatctccagtggaaaacagaacggaggctgtccgtgtgttagattgtcggaacactaccgcatttctacggtcttacggccgcgattgtggggttaggtgcacagaaagtcggccaatttagcacattggcgccttgcccaaaatccctgtcgttgttagagtttgccgcacttttttacccacgcgttgcctagggtccctttcccatgttcaagaaactgcgtggcatgttttccagcgatctttccattgacctgggcactgccaacacccttatttacgtgcgcgagcgcggtatcgtcctgaatgagccatcggttgtggccattcggacccatggtaatcagaaaagtgtcgttgccgtcggcaccgaggccaagcgcatgctcggccgtacaccaggcaatattgctgccattcgtccgatgaaagacggcgtgatcgccgacttcagtgtctgcgagaagatgctgcagtacttcatcaacaaggttcacgaaaacagtttcctgcagcccagccctcgtgtgctgatctgtgttccatgcaaatccacccaggttgagcgtcgcgccatccgtgaatcggccctcggtgccggtgctcgtgaagtgttcctgatcgaagagccaatggcggctgcgatcggtgccggcctgccggttgaagaagcgcgcggttcgatggtggtggacatcggtggtggtaccactgaaatcgccctgatttccctgaacggtgtggtgtatgccgaatccgtccgcgtcggcggcgaccgcttcgacgaagcgatcatcacttatgtacgccgtaactacggcagcctgatcggtgaatccaccgccgagcgcatcaagcaggaaatcggcaccgcctacccgggcggcgaagtgcgcgaagtcgatgtgcgcggtcgcaacctggccgaaggcgtgccacgtgccttcaccctgaactccaatgaagtgctggaagctctgcaagagtccctggccaccatcgttcaggccgtgaagagcgccctggagcaatcgccgccggaactggcttccgacatcgccgagcgtggcctggtgctgaccggtggtggcgctttgctgcgcgacctcgacaagctgctggcccaagagactggcctgccggtgatcgtcgccgaagacccgctgacctgcgttgcccgtggcggtggtcgtgcactggaaatgatggataaacacaccatggacctgctttccagcgaataagcctttgctggtgagcccatgtttcgcccgcaggcagcactttgcagtgctgcctgttggcgtttatcttcttcaatctgcatccaggccggttagatgccgtatgaataaagagaacatttgcctgggaggagcggcttattaaaccgcttttcgccaaaggcccctcattgggcgtgcgcctgttggtgctggtcgtgctttcggtcgcgctgatggtggtcgatgcccgctttgcactgctcaagcccgtgcgcagccagatgtcgctggtgttgatgcagacctactggatcaccgacctgccgcaacgtctgttccagggcgtggccagccagttcggcagccgcaccgagttggtcgccgagaacgaaaaactcaagactgagaacctgctgttgcagggacgcatgcagaagctggcggccctgaccgagcagaacgttcggctgcgcgagttgctcaactcttccgcattggtcaatgaaaaggtcgaagtagccgagttgatcggcatggaccccaaccccttcacccatcgcattatcatcaacaagggtgaacgcgacggggtggtcctcggccagccggtgctcgacgcccgtggcctgatgggccaggtggttgaactgatgccctacacctcgcgggtgttgttgctgacggacaccacccacagcatcccggtgcaggtgaaccgcaacggcctgcgtgcgattgccagcggcaccggcaacccggaacgcctggagctgcgccacgtcgccgacacggcggatatcaaggaaggcgacctgttggtcagctccggcctgggccagcgtttcccggcgggttacccggtggcgacggtcaaggaagtgatccacgattccggccagccgttcgctattgtacgtgccgtgccgaccgccgccctgaaccgcagccgctacctgctgctggtattcagcgacaaccgcaccccggaagagcgtgccaacgacgccgcccaggcccaggaagcggaagacaagcgcaacggtacagcgccgatcgttcctgcaacggtgcccaagcctgcattcgtagggccgcccgcacccgccgctaccccggccgcgcccgtggccacaccggtcaagccggccgcccacaacgctcgcccggccaaaccggcggcgactaaaccaccggccgccacgcctgcagccaagcctcctgcggccgctgcggccaccacgcggcagagggaagaataatggccggtactcattcgcgtaacggttggatcgtctggctgacctttgccatcggtttgttgctcagtgtttcgccgctgccgcagttcatggaaatccttcgcccgctctggctggcgttgctgttggccttctgggcgctgaacctgccgcacaaagtcggcatggtcacggcgatgttcctgggcctggcggaagatgtgctctatggcaccttgctgggccagaacgcgttgatcctgacgttgatcactttcctggtgctgtcgttgcagcaacgtttgcgcatgttcccgatgtggcaacagtgcctggtgatcctggtgatcttcggcctggcgcagttggttcagctgtggctcagcgcgttgaccggcaaccgtcaaccgaccctcgcgctggtgctgccggccctggtcagtgcgttgctgtggccatggatcagctttggtctgcgtgggttgcgtcgtcgctataaaatcaattgaatggattgcgaggctctgcctggttatcgagccctacagggagagtctgcaatgaattcgctttacctggcctcgggctctccgaggcggcgtgaactgttgacccagatcggtgtgcccttcaccgtggtcagcgccgctattgatgaaacccctcttacaaatgaatccgccgtttcctacgtggagcgcctggcgcgcggcaaggcagcggcgggttttgctgtgctcccaaatacgtctggcgcctgtgtgctgggggctgatacggctgtgatcgttgacggtcagatcctcggtaagcccgttgaccaggccgacgccttggcgatgttgatggccctggcggggcgtgagcacgaggtactcaccgccattgccctcaccgacggccagcgctgcgagattgtttgtgtaagtagtcgtgtacgttttcgcgacatttctgtcgaggaggctacaacctactggcacagtggcgaaccccaggacaaggcgggcggctatgctatccaaggcctgggctcggtgtttgtggccgggctcaatggcagttattcggcggtagtcggcctgccggtgtgcgaaaccgcacaactgctccatcaattcggcataccctgttggcaaaatcttaccgcgcgctgatcgccgttccccagcgcccagccttaagcgattggtcactattgtgaaaacgcctgaacgagacccagccatgagtgaagagattctgatcaatatcacgccgatggaatcgcgcgtggcggtggtagagaacggtgttctgcaagaagtgcacgttgagcgcacccagaagcgcgggatcgtcggcaatatctacaaaggcaaggtggtgcgcgtattgccggggatgcaagcggcattcgtcgatatcggtctggatcgtgcggcatttatccatgcttcggaaatttccctgcgtgaaggccctgctgtggaaagcatcagcgcgctggtgcatgaagggcagagcctggtggtgcaagtcaccaaggaccccatcggttccaagggcgcgcgcctgaccactcagctatcgataccatcgcgttacctggtgtacatgccgcggaccgcgcatgtcggcatttccttgaagatcgaagacgaagccgagcgcgagcgcctcaagaaggtggtcagcgactgtgtggccgccgaaggcatcaaggaagcaggcgggtttatcctgcgcaccgccgctgaaggcgccggcgccgatgaaatcctcatggacatccgctatctgcggcgtctgtgggatcagatcggtgcccagatcaagaccatcggtgcgcccagcgtcatctatgaagacctgggcctggccttgcgcacactgcgcgacctggtcagcccgaagattgagaaaattcgcatcgactcgcgggaaaccttccagcgcaccacacaatttgttgccgaactgatgccggaaattgccgatcgcctggagcactaccccggcgagcggccgatcttcgacctgtatggcgtcgaagatgaaatccagaaagccctggaacgcaaggtgccgctcaagtccggcggctacctggtggtggacccggcggaagccatgaccaccatcgacgtcaacaccggcgcgttcgtgggccatcgcaacctcgaagaaaccatcttcaagaccaacctcgaagcggcgaccgcgattgctcgccaactgcgcctgcgcaacctgggtggcatcatcatcatcgacttcatcgacatggaagacgaagagcaccagcgccaggtgctgcggaccctcgagaaacagctggagcgtgatcacgccaagaccaacatcatcggcattaccgagttgggcctggtgcagatgacccgcaaacgcacccgcgaaagccttgagcaagtgctgtgcgagccgtgcagcagttgccaggggcgcggtaagttgaagaccccggaaacggtttgctacgagattttccgcgaaatcctgcgcgaggcgcgtgcctaccaggccgaaggttatagagtgctcgccaaccagaaagtggtcgaccggctgctggacgaagagtctggcaacgttgccgaactggaaggctttatcgggcgcacgatacgcttccaggttgaaaccatgtattcccaggaacaatacgacgtggtgctgctctgatccccattcgctttccttttatgagacaggcaggccttgatctgccgttcgactactgccttgagggtcgcctgacatggagcgtctgatacgcttttttgccgctttgacccgttgggggctgggcctctgtgccttgttgctggtgctggcggcggtgtacgtgagcctggggcgtgaattgactccgttggtggccgagtaccgcgccgaagtcgaagccaaggcccaggcagccgtggacatgcctttgcatatcggcagcctcgaaggccgctggagcggctttgcgccggtattgctggcccatgatgtgatggttggcgagggcagcagtgccttgcgcctggaccaggtcgaagtggtgcctgatgtctgggccagtctgatggcccgcgaagtgcgcattgcccacctgcaagtcagtggcctgcaactcagcgtcaaggaagacaaggacggcaagtgggccttgcaaggcctgccggtgcaggacgaccagccgctggacccggagcagttgctcacgcagatgcagaaggtcaagcgcgtgtcgctgctcgacagccaagtgacgctgcaaccgttcgaccaggcgccggtgaccctgacgtatgtcggcctgagcctgcacaccggcgtcacccgccaacgcctggatgcacgcctgaccctgcctgacggccagcccctcgccatgagcctgcgcacccgcattcgcgccagccagtggaaggacggggaagtccaggcttatctgagcctgccccagagtgattgggccaagtggatccccgcaaaactgactcaacagtggaagctcacgcagttcaaggcgggcggtgagttctggctgacctgggccaaaggcactgtgcaaagcgcagtagtgcgcctcaactcgccacaggtgaagggccactacgccgagcgcaagccggtgcatatcgaaaacctcgcgcttacggcctacctgcaacgcagtgacaccggcctcagcgtgctgttcgactcactggcgatgaatctgggcgagacccgctgggaatcacgcctgcagttgcagcagaccctggccaccgacaaggacctggaagtctggaagctccaggccgaccgcctggacctgacgcctatcacaccattgctcaatgcgctggcgccgctgccggaaggttttgccaagacggtcgagcacctcaaggccactggcctgctgcgtaatgtgctggtggacttccgtccccaggacacgaccgataagaaggtcagcttcgccgccaacctcgaacgcatcggcttcgatgcctacttcggcgcaccggctgcgcgtaacgtgtccggcagtatcagcggcgacctgggccagggcgagttgcgcatggacagcaaggacttttccctgcacctcgacccgatcttcgccaagccctggcagtacctccaggccaatgcacgcctgacgtggaagctggacaaagaaggcttcaccctgatcgccccttacatcaaggtgctgggcgaggagggcaagatcgccgccgacttcctgatccgtctgcatttcgaccacaaccaggaagactacatggacctgcgggtcggtatggtcgatggcgacgggcgcttcacccccaaatacctgccggcggtgttgagccccgccctggatgaatggctgcgtaccgcgattctcaagggcgcggtggatcaaggcttcttccagtatcagggttcgttgaaccacgatgcgctgccggcttcacgcaatatcagcctgttcttcaaggtgcatgatgccgagctggcgttccagccgggctggcctcatgtgagcaaggtcaacggcgaagtgtttgtcgaggagagcggtgtgcgcatcctggccagcaagggccagttgctcgataccaaggtcaaggacatctacgtcaatattccccacgcagctgcgggcaaagacagccatctattgctcacgggcggttttgccggtggcttgggtgatggcctgaaaatcctccaggaagcgccgatcggcactgcatcgacttttgccggctggaagggcgagggtgacctgcaaggcagccttgacctggatattccgttggccaagggcaccgaaccaaaaatcgtggtggacttcaaaaccgacaaggcgcgcctgcaattggccgagccgcccctggacctgacccagatcaagggcgagttccgtttcgacagcgccaagggcctcagtggccagaacatcaccgcccaggcgtttgatcggccgatcactgcgcagatcgttgccgatggcaaaccgggcaatatcagcacccgtgtgaatgccaagggccaggtaacggtcaagcggctgacggactggttgaaaatcagccagccgttaccggtgtccggcgatattccttaccagttgcaggtgaccctggatggcgccgacagccaactgatggtcagttccaacctcaagggcgtggccgttgacctgccggcgccattcggcatgccggccagccaggggcgtgacagtgtgttccgcatgaccttgcagggtgccgagcgccggtactggtttgattatggcgagctggccaactttacctttgctgcgccgccggacaaattcaatgacgggcgcggtgagttgttcctcggtgatggcgatgccgtgctgccgggtgccaagggcttgcgcattcgtggggtgttgtcggagctggacatcgatccgtggaagaaactggtggatcgctatgcgggcaatgacccgggcggcagtgccaagcaattgctcagcggcgctgacttcaaggtgggcaagctgaccggttttggcacccagttcgatcaagtcagtttgcaacttgaccgtaagccagcggcgtggggcttgcagctcgacagccagcaggccaagggtacggtcaacctgccggacgccaagggcgcgccgattgcgatcaacctgcagtacgtgaagctgccggcggtggacccgacggtacaggcggatgaaaacgcgccggaccccttggcgaacatcgaccccaaggatattccagcgctggatatcgccatcgaccagttgttccagggcccggacctgatcggcgcctggtcgctgaaaatccgcccgaccgccaagggcctggccttcaacaacctggatctgggcctcaagggtatgcagctcaagggtgcgggtggctgggagggcgcggcgggagacagcagcagctggtacaagggccgcctggatggcaagaatattggcgatgtactcaaggggtgggggtatgcgccgaccgtcaccagccaggatttccatctggatgtggacggacgttggcctggttctccggcctatgtagggcccaagcgtttctccggcagcctggatgcggcgttccgcaacggccagttcgtcgaagtggagggcggagcccaggccctgcgggtattcggcctgctgaacttcaactccatcgggcggcggttgcgtctggacttctccgacttgctcggcaagggtttgagctatgaccgggtcaaaggcctgctggccgccagcaatggcgtgttcgtgacccgggagccgatcaccatgactgggccgtcgagcaacctcgaactcaacggcaccctggacctggtggctgaccgtgtcgatgccaagctgctggtaacgctgccggtgaccaacaacctgccgatcgcggcgttgatcgtaggtgcgccggccattggtggcgcgttgttcctgatcgacaagttgatcggtgaccgtgtttcacgcttcgccagtgtccagtacaaggtcgaaggcccgtggaaagacccgaaaatcaccttcgacaagccatttgaaaagccaaactgagaggctgtggagtagcatggtgccatgccctttatggagtgttggcccatgtcctttgcggtaattcaaatggtcagccagagtgacgtgctggccaacctggcccaggcccgtcgcttgctggaagaagccgcggccggtggtgcgaaactggcagtgttgccggaaaatttcgccgccatgggccgtcgtgacattgccgatatcggccgtgccgaagcgctgggcgaaggcccgatcctgccgtggttgaaacagaccgctcgcgacctcaccttatggatagtggctggtactttgccattgccgcccaagggccaaccgcacgccaagtccaacgcctgctcgctgctaatcgatgatcagggcgaaatcgtcgcccgctacgacaagctgcacctgttcgatgtggatgtcgccgatgctcgtggtcgttatcgcgaatccgacgactatgctttcggaggtaacgtggtggtggcggacacgccggtcggccgtttgggcctcacggtgtgctacgacctgcgcttccccgagctgtacagcgaattgcgtgctgcgggggctgaattgattacagcgccgtcggcgtttacggcagtgaccggcgccgcgcactgggacgtgctgattcgcgcacgggccatcgagacccagtgctacctgctggcggctgcccaggggggtgtgcatccggggccacgggaaacctacggtcacgcggcaattgtcgacccctgggggcgcgtgctgacacaacaggatcaaggcgaagcggtgttgctggccgaacgcgatagcagtgaacaggcgtcgatacgggcgcgcatgccggtggtcaaccatcggcgctttttctcgcagggcgcacagcggcctgcttcggaacgatgaatttaaggccatacctatgagcgagttgttgtcctcagtcagtgatcacctcctggcgcccggtggcgtgaccatcgaaagcttgcaaaccgtgctgggcgatctcgccggtccgggcatcgacgcggccgacctgtatttccagggccagatttccgagtcctgggcactggaagacggcatcgtcaaggaaggcagtttcaacctcgaccagggtgtgggcgtgcgggcgcaatccggtgagaaaaccggttttgcctacagcaacgcgataaccctggaggctttgggcctggccgcacgtgccgcacgctcgatttcccgcgccgggcagaacggcacggtgcaggcgttcagcacgcaggacgtgacccagttgtacgggccggataacccgttggaagtgatgacccgtgccgagaaagtcgacttgctcaagcgtgtcgatgccgcgacccgtgcattggacccgcgtatccagcaggtcaccgtaagcatggccggcgtgtgggagcgcatcctggtggcgtccaccgacggcggcctggcggcggatgtgcggccgctggtgcgtttcaacgtgagtgtgatcgtcgagcagaacggccgtcgcgagcgcggtggccatggtggcggcgggcgtaccgactaccgctatttcctcaccgacgaccgtgccatgggttatgcgcgtgaagcgctgcgccaggcactggtcaacctggaagccattccggcgccggcgggtacattgccggtggtgctgggctcgggctggtccggcgtgctgctgcacgaagcggtcggccacggcctggaaggtgacttcaaccgcaagggcagttcggcctacagcgggcgcatgggggagatggttgcgtccaagctctgcaccatcgtcgatgacggcaccctggccgggcgccgtggttcgctgagcgtcgacgacgaaggcacgccgaccgagtgcaccaccctgatcgaaaacggtgtgctcaagggctacatgcaagacaagctcaacgcccgtctgatgggcgtggcgcgtaccggtaatggccgtcgtgaatcctatgcgcacctgccgatgccacgcatgaccaacacctacatgctgggtggcgaaagcgatccggctgaaatcatcgcctcggtgaagcgcggcatctactgcgccaacctcggtggcggccaggtggatatcaccagcggcaagttcgtgttctccaccagcgaggcgtacctgatcgaagacggcaagatcactgcgccggtcaaaggcgcaaccttgatcggtaacggtccggaagccatgagcaaggtgtcgatggtcggtaacgacctgtcgctggacagcggcgtgggcacatgcgggaaagatgggcagtcggtgccggtgggtgtcggccagccaacgctgaagattgatgcgatcaccgtgggtggcacggggtcgtaagcggtggagcttcgggtggcgaaggccgccacccggggaagggcatcaacgcaggccgcgttgagtctcgtccagctcacggatgtacttgaagattttacggctggtggccggcgccttgttatgcgccagctcgtgctgggcctgacggatcagggagcgcagttgctggcggtccgcatccgggtagtccagcacgaatttctccagcaccgcgtcatcgcccgagatcaggcggtcacgccaacgttccaggttatggaaacgttcgttgtactggcgagtggaggcatcggtttgatcgagcaaagtcagaatggcgtcgatgtcctggtcgcgcatcagcttgccgataaacgagatgtgccgtttgcgcgcgatattcgcggtgtgcttgggcgcatcggccagggctcgacgcatttcgtcggtcaaaggcagttttgcaatcaaatcttttttgagcgttgtaaggcgctcgccgaggtcaaccaacgcatgcagctcgcgtttgacctgggttttgcttttctccccatcgagggagtcgtcgtaagaatcaaccatggtggcagtccgcaaagaaacgccgccatgataaccagtcgggggccgcttgtccggcccggtcgctcgatggccttaaccgaaagcagaatttgagtggagaaaaccatgagtgcagcccaaagcgtcggtccgcaagcgttaccggcactgcaggaacaagtcgagcagatccttgccgaggccaagcgccagggggccagtgcctgtgaggtggcggtgtcgctggagcaggggctgtcgacgtcggtgcgccagcgggaagtggaaactgttgagttcaatcgcgaccagggctttggtatcaccctgtatgtggggcagcgcaaaggttcggccagtacctcggccagtggtccggaagcgattcgcgagacggtcgcggctgcgctggcgattgccaagcatacgtccgaggatgaaagctcgggcctggccgacaaggcgctgatggccaaggacttgaaagactttgatctgttccatgcctgggacatcacaccggaacaggctatcgagcaggcgctgacctgcgaagccgccgcgtttgaagctgatgcccgcatcaagaacgcggatggcaccacgttgagcacgcatcagggctgccgcgtatatggcaacagccatggtttcatcggtggctacgcgtccacgcggcatagccttagctgcgtgatgatcgccgaagcgaatggccagatgcagcgcgattactggtatgacgtgaaccgccagggcgatttgctggccgacccggtcagtattggccagcgcgctgcgcagcgggcggcgagccgcctgggcgcgcgcccggtaccgacctgcgaggtgccggtgttgttttcggcggagttggccggaggcttgttcggcagtttcctgggggcgatttccggcggcaacctgtaccgcaagtcgtcgttccttgaaggcgcgatcggccagaagctgttccccgaatggctgaccatcgacgagcgtccgcacctgatgcgcgccatgggcagttcagcgttcgacggtgatggcctggccacctatgccaagccgtttgtcgagaagggtgagttggtgtcctacgtattgggtacttacgccggtcgtaaattgggcctgccaagcaccgcaaactccggtggcgtgcacaacttgttcgttacccatggtgatgaggaccaggcggcgctgctgcggcgcatggggcgtgggctgctggtgaccgagttgatgggccatggcctgaatatggtgacgggcgactactcccgtggcgcagcggggttctgggtggaaaacggcgagattcagtttgccgttcaagaggtgacgattgccggcaacatgcgcgatatgttcaagcagatcgttgccgtcggaaatgacttggagttgcgtagcaatatccgcacgggttcggtgttgatcgagcggatgaccgtcgccggcagctgatccttcagacgcgcttcaacaagaaggcgcgccatctttatagatggcgcgcctttttttgtggtggcgtttcaggaggattgtcctgccacacttgttttgattctcaatatcatttaataataaatatcattaccgaatgagtgtggatcatgagttctgtcctgcatgaggatccttacctggagagctggcgctggatgagtcgccagattcgttgcggcctcgaccccaacgagccgcgcctgatcgaacactacctcaacgagggccgatacctggcgtgctgcaccgcgacccatccgtggacgatcgctgaaacctcattccgcctgttgctcgacaccgccagcgatatcgcgctgccctggcattggcgttccctgtgcctggaccaggcctggcgcccgctgcgcgacctggaaaaactctcccactgtgcctgccgcctcaagcgctggcagagctttgcctggcaattggcgacctgcgaattgctgccgtctatttctcactccgaccttgttcaaggatctaacgatgagtaacacccgtatcgaacgcgacagcatgggcgagctgcaagtgcctgccgaggccttgtatggcgcacaaacccagcgagcggtgaacaactttccgatcagcaatcaacgcatgccggcgcaattcattcgtgccctgatcctggccaaagctgcggcggccaaggtcaacgtcgacctcaagcaaatcagcgaaagccagggcaaggcgattgtcgatgccgcccagggcttgctggaaggcgacttcatgcagcacttcccggtggacatcttccagactggctccggtaccagctccaacatgaacgccaacgaagtgattgcgacccttgccagccgcttgctgggtgagccggtcaaccccaatgaccacgtgaattgcggccaaagcagcaacgacatcattccgaccactatccacgtcagcgccgcgctggtgctgcatgagcaaacattgcccgcgctgttgcatctggtgcaggtgatcgagcagaaagccgaggaagtccacccgttcatcaagaccggccgcacgcatctgatggacgccatgccggtgcgcatgagccaggtgctcaatggttgggcgcagcagctcaaggccaatatcgggcatttgcaggaccttctgccgagtttgcaagccctggcccagggcggtactgcggtcggcaccggaatcaatgcacacccggaattcgcggtgcgtttcagtcagcagttgagcagcctgaccggtgtgaaattcaccccgggcaagaacctcttcgcgctgattggctcccaggacacggccgtcgctgtctccgggcagttgaaagccaccgccgtgtcgctgatgaaaatcgccaacgacctgcgctggatgaactccggcccactcgccggcctgggggaaatcgagctggaaggcctgcagcctggttcgtcgatcatgcccggcaaggtcaacccggtgatccctgaagccaccgcgatggtggccgcacaagttatcggcaacgacacggtcatcaccgtcgccggccagtcgggcaacttcgaactgaacgtgatgctgccgatcatcgccaataacctgatcagcagcctcgagttaatggccaactccagtcgtttgctggcggacaaggccattgccagcttcaaggtcaatgaggccaagctcaaggaagcgctgtcgcgcaacccgatcctggtcaccgcgctcaacccgatcatcggttaccaaaaggctgctgaaattgccaagaaggcctatcaacagggccgtccggtgattgatgtcgcccttgagcacaccgacttgccgcgcagtcaactggaaatcctgctggatccggaaaagctcacggccggcggcgtgtaatcaccgactctgctttggaggctcaccatggagcactggaaacgcacgatcgaacgggccaatcgctgctttatggcgggtgaattggttgacgctcgcgaggcttacttgcaagccctggccctggcccaagtgctgttcgaacgctgggcggatgccgacgaagcagtggcggcttgcgtcatttcccatcacaacctggcggacctgcacctgcggctgaaccagccggaagaaagcgcggaatacctttgcgctatccaccagcgtcttttgcagaccatgcaggacccgcgcctgagcccgcagttgcgggaggcggcgctgcgccagagcagcaaaacctacgtcgaactgttgaatttcatcagcgatcacggcgaataccctcgcactcatcgcttgctgggcagtactgcagtgcagcccgccacgccccactacggagcccattgatatgacttacaccctgcctgccttgccttacgcgtatgacgccctggaaccgtatatcgatgcgcaaaccatggagattcactacaccaagcaccaccagacctacatcaataacctcaacgcagcggtcgaaggcaccgagttcgcgggctggccggtcgagaaactggtgtccagcgtgcagcaactgccggaaaaactgcgcgcagcggtgatcaatcagggtggcggccatgccaaccattcgttgttctgggcggtgatgtcgcccaagggaggtggcaagcccgaaggcgtgctgggtaaagccatcgacgaacagctgggtggtttcgacagcttcaaggaggctttcaccaaggctgcgttgacgcgcttcggcagcggctgggcctggttgagcgttaccccgcaaaagaccctggtggttgaaagtagtgggaatcaggacagtccgttgatgaacggcaataccccgatcctcggcctggacgtctgggagcacgcctactacctgctgtaccagaaccgtcgcccggaatacatcaacgccttctacagcgtcattaactggccggaagttgctgcccgctatcaggccgcggtggcctgacattcaccttcataacaagacctaaggccgactatgggcactgaaacactggcgatcagcagcggacgaatgtttcgttatgcatttggctcgctgctgctattggcaggtactgcattgctggtggcccacgggctggcctggctgaacctggaaccgcgcatcctgcgcgccctgcaaggcggctccatttgcgcgctgggtacggcgctgggcgcggtcccggtactggtgatccgacgcatgccggtggcgctgagcgatacattactgggttttggcgctggggtgatgctggcggcgacggcattttcgctgatcgtgccgggcattgccgcggctgaaagcctggggctctcgccgtggggtgctagcggcttgatcagctttggcatcatgctgggcgcattcgggttgtacctggttgaccgcaaggtctccggtgccagcccggaaatgctgatggggacgccagacaagccggtgatcccgccgcgcatctggctgtttgtgtttgccatcatcgcccacaacatccccgaaggcatggcggtaggcgtttccgccggtggcggcatgcccgatgctgacagcttggccatgggcattgcgttgcaggacgtacccgaaggcctggtgattgcgttggtgttggccggggcggggatgtcgcgggtcaaggcgttcctgatcggcgctgcatcaggcctggtggagcccgtattcgctgtgctctgcgcctggctggtcagcctggccgaagtgctgttgcctttggggttggccctggctgctggcgcgatgctgttggtggtgacccacgaagtcatccccgagtcgcgacgcaatggtcacgaaaagctcgccagcctgggcctgtgcatcggtttttgcttgatgatggtgatggacaccgctctggggtaggttacgtctactgtaggagcaagcaagctcgctcctacagggggttattcaccttcgtcgaagtaattgttgatcagcgccgccagcgctgccatcgcttcgtcttcctgctcgccttccgtcttcaagtgaatcctggtgcctttgccggccgccaacatcatcatggccatgatgctcttgccgtcgaccatggattccggtgtacgcccggcgcggatctggcaggggaactgccctgctacgcccacgaacttggctgaggcgcgggcgtgcaagcccagcttgttgatgatttcaatttccagagcgggcatcgcgggggtgttcctttcagctaaggtcgcggtggcggacctggacgttcttgagggtttgttgcagcacctggcccaggcgctcggtcaggtagacggagcggtgatggccgccagtgcagccgatggcaatggtgacataggcacggttgcttgcagcaaagcgtggcagccatttgagcaagtaggaggagatatcctggaacatctcctccacatccggttgcgctgccaggtaatcggccacgggctgatccagcccggactggtcacgcagttccggtttccagtacgggttaggcaggcagcgcacatcgaacaccaggtcggcgtcgaccggcatgccgcgtttgaacccaaatgactccacgagaaacgcggtgcccggctctggctggttcagcaggcgcagcttgatagcatcgcgcaactggtaaaggttgaggctggtggtgtttatcttgaggtcggcgaggtcaatgatcggccccagcagcttggtttcgtcttcgatggcttcggccagagagcgatgggggctgcttagggggtgacgccggcgggtctcggagaagcgtttgagcagggtttcttcgtcggcgtccaggtacagcacgtcgcaatgaatgtgcttgccccgcacttcctcgagcaattgcgggaatcgctcaagatggctgggcaggttacgggcatcaatcgaaacggcgaccagcggttgggccagttcggtatggatcaaggcgcgttcagccaactccggcagcaggccggcgggcaggttgtcgatgcaatagaaaccgttgtcctcaagaacgttgagggcggtgcttttacccgagccggagcggccgctgacgatgatcaagcgcatggttactgcccgttctgttcatccaggacaacctggtacaacgcctcattgctgctggcgctgcgcagtttgtcgcgtacttccttgcggtcgagcatgctggcgatctgccggagcagttccaggtgcgcatcggtggcggcttgcgggaccagcagaacgaacagcagatcaaccggggcgccgtcgatggcgtcgaaatcgatgggggcttccaggtgcagcagggcgctgacaggtgtttcgcagcctttgaggcggcagtgaggaatggcgatgccgttgccaaaaccggtggaaccgagtttttcacgggcaatcagcgcatcgaagacatcttgcatctccagatccggcacttcgcgtgcgatcaggttggcaatttgttcgagggctttcttcttgctgccacccggcacgttcacgagggaacggccgggggtcaggatggtttcaagtcggatcatggggggagagttaacgacctgtaccttgcatcaggtgcagattcttttccttatgctttatgagttggcggtccagcttgtcgtagagcgagtcgatcgccgcgtacatgtcttcatgttccgcattggcgacgagcttggcattcggtacgtgcagggtggcctcgattttctgcttgagcttatcgacctccatgatgacctgcacgttggtgatcttgtcaaaatgccctgcaagcttgttcaacttgctttcggtgtactcacgcaggggcttggtcacttccagttggtgtccactgatgttgacttgcatacagcttctccttcgttgccagtgcataaagcggcaggcaaaggcgcctgccactggaacgctgtggcccgcccgtcacatcaaacgcttacgctcgctggaaggcgcgatcccaagggactcgcggtacttggcgacggttcgacgggcgacctgaatgccttgtgcctccagtaaaccagcgatcttactgtcactcaatggctttttctgattttccgccgcaaccagttttttgatgatcgcgcggatcgccgttgacgagcattcgccgccttcggaggtgctgacgtggctggagaaaaagtatttcagttcataaataccccgtggggtatgcatgaatttctgcgtggtcacgcgtgaaatggtcgactcatgcatgcccaccgcttcggcgatgtcatgcagtaccagcggcttcatcgcctcgtcgccgtattccaggaagccgcgctggtgctcgacgatctgggtggcgactttcatcagggtttcgttgcggctttgcaggctcttgatgaaccagcgggcttcctgcaactggttgcgcatgaaggtgttatcggcgctggtgtcggcgcggcggacgaaaccggcgtattgcgggttgacccgcaggcgtggcaccgactcctggttcagctccaccagccaccgctcgttgtccttgcgcacgatcacgtcggggacgacgtattcggcttcgctggactcgatttgcgagccggggcgcgggttaaggctctgtaccagctcgatgacctggcgcaggtcgtcttccttgagcttcatgcggcgcatcaactggctgtagtcgcggctgcccagcaggtcgatgtagtcggtgaccaggcgctgggcctcggcgagccatggggtcttggccggcaactggcgcagttgcagcagcaggcattcgctgagggtgcgcgcgccgataccggatggctcgaactgctggatgcggtgcaggacggcttcgatctcgtccagttcgatatccagttcggggtcgaaggcttcaagaatttcttcaagcgtctcgtctagataaccctgattgttgatgcagtcgatcagggttacggcgatcaggcgatcggtatccgacatcggtgccaggttcagttgccacagcagatggctctgcaggctctcgccggcggaggtgcgggtggtgaagtcccactcgtcatcgtcattgctgggcaggctgctggcgctggtctggtagacatcttcccaggcggtgtcgaccggaagctcgttgggaatgcgttcgttccattcgccttcctcaaggttgtccaccgtgggggcggtttcctggtaggagggttcctgcacgtcggaattgggtttttgctcgatgttatcggccagcgggtctgcattatcgaagtcgtcgccttcttcctggcgttcgagcatcggattggactccagggcctcctggatttcctgttgcaggtccagggtcgacaattggagcaggcggatggcctgttgcagctgcggtgtcatcgtcagctgctggcccattctcaggactagcgatggtttcatggcaggggcttaacaccttattcgccggcgcaatgcgccatccacgacagggcgcgtgagcgccaaacataagcaaattatatgcctgatgtcgggtgctttgcctagagcgcggtaacaataaaaatccggaggttttcattgactcccgcgcaccttggcgaacgccgtgacaccacggtgtttacaggcggaactcgtgacccaggtacacttccttgaccagttcattggccaggatggtagcggaatcaccttcggcaatcagttggccgtcattgacgatataggcggtttcgcagatatcgagcgtctcacggacgttgtggtcggtgatgagcacgccaatgcccttggccttgaggtgatggatgatctgcttgatgtcgccgaccgaaatcgggtcgacgccggcaaacggctcgtccagcaggatgaacttgggggcagtggccagtgcgcgggcgatttccacgcgacgacgctcaccaccggacaggctcatgccgaggttgtcgcggatatggttgatatggaactcctgcaacaggctttccagctccttgcgacggccgtcacggtcgagttccttgcgggtctcgaggatcgccatgatgttgtccgacaccgacagtttgcggaagatcgacgcttcctgcgggagatagccgataccggcccgtgcgcggccgtgcattggctggtgactcacgtccaggtcatcgatcaggacacggccctgatccgcctggaccagaccgacgatcatgtagaagcaagtggtcttgccggcgccgttggggccgagcaagccgacgatctggccgctgtcgatcgacaggctgacgtcgcgcacgacctgacggcttttataggccttggccagatgctgggctttcagggttgccattactcggccttcttcttcggctggataaccatgtcgatgcgtggacgaggcgcggtgaccttgttgccattggcacgaccggcattagcgatctgtttcacggtgtcataggtgatcttctcaccttccgtggagttgccatcggggctgagcaccttggcctggtcaatcagtacgatgcggttctgctgggcgtggtactggatggtcttgccgtagcccttcatcgggccggtgtcggtcgcggactgcttctgttcgaagtaagccaggttgcccaccgaggtcacgacatcgatgtcgccggttttggtgcgcgttagcgtcacggtattgccggtgattttcatcgagccctgagtgatgatcacgccaccggtgtaggttgcgacgccttgcttgtcatcgagctgtgcatcatcggccgagatgtggatcggctgctggctatcgttcggcagagcccaggcgctcacgcttcccagtgctgcgcccaggccgagcaaaatagggagagttttaacgagcctcatactgtcctcttacgttcgatagcaggtgtatcctgctttctttcaaatacgctttcattcccttgccagtcgatacaccgccagcgccgtcgattctaacgtcttgctcggtctgcgcatattgcttctgcgggaatacggtcatgcgactgctggtaatcaccgtctcacggcttttatcgtcagtgcgcgcaatgcgcaccgagtcgatcagttccacctcggtaccgtccgggttgacctcgccacgcttgctggtgacgtgccatgggaactcggtaccgcggtaaatgttcatgtccgggttggtcagcagggtgacctcggtggccttcacatgctcgaccttgtccgaggtcatttcgtactgcaccttgccgtcaggcaggaactgcacacttttggcattgatggcgtaatagtcgatagcgccttcgtcaacctgcgcagcaggctggtcgagaaagcgctccgggctgatattccagtagcccaccgcgaggaacagcgcggcgatgaccccgaataacaggaagttgcgaatctttttgctcagcataaaacgctctataagtaggcggcgtgtgccgcttcaaggctgccctgggcacgcaggatcagctcgcagaactcgcgggcggcaccttcgccaccgcgggcgctggtgatgccgtgggcgtgttcgcgaacaaacgccgccgcattggcgacggccatgcccaggcctactcggcgaatcaccggcaggtctggcaagtcatcacccaagtaggcgacctgctcatagcttaggttgagttggccaagaagctcgtccagaaccaccagtttatcctcgcggccctgatacaggtgaggaatccccaggttttgtgcgcgacgttccacaacgggcgtttttcggccgctgataattgccgtttgcacacccgccgccatcagcattttgatgccctggccgtccagcgtgttgaatgtcttgaattcgctgccgtcttcgaggaagtacaggcggccgtcggtcagcacgccgtcaacgtcgaaaatcgcgagtttgatatttttgccgcgttgcaacaggtcgctggtcatctacatcactcctgcacgcagcaagtcgtgcatgttcagggcgccaatcgggcggtcgtcgccatcaaccaccaccagcgcgccgatcttgtggtcttccatgatcttcaaggcttcggctgccagcatctctgggcgtgcggtcttgccgtggggtgtcattaccgcgtcgatggtggcggtgtggatatcaatcgtgcggtccagggtgcggcgcaggtcgccgtcggtgaagaccccggccaagcggccatcggcctccaggatcaccgtcatgcccaggcccttgcgggtcatttccatcagcgcatccttcagcaaggtgccgcgctggacatggggcaactcctcgccggagtgcatgacgttttccactttcagcagcaggcggcgacccagggcgccacccggatgggaaaacgcgaagtcctcagcggtaaacccgcgggcttccagcagcgctacggacaaggcatcgcccatgaccagcgcggccgtggtggaggaggtcggtgccaggttcagcgggcaggcctcgtggtccacgtggacgttcaggttgacttcggcggccttggccagcgtcgactccgggttgccggtgatgctgatcatctggatgcccaggcgtttgatcagcggcagcagggtaacgatttcgttggtagtgccggagttggacagcgcaaggatgatgtcatccttggtgatcatgcccatgtcgccgtggctggcttcggccgggtgcacgaaaaacgcggtggttccggtactggccagggtggcggcgatcttgttgccgacgtggcccgacttgcccatgccgaccaccacaacgcggcccttgctggccagaatcatctcgcaggcgcgtacgaaatccgcgtcaatatgggccagcaagccttctacggcttcaagctcgaggcggatggtgcgttgtgcggattgaataaggtcgctggattggctcatgtctgaaatcgtatagcctgacgaaaagtcggcgattatagcggtaatgatcaattccctcacgcaagttcgtcagggtttgttcgcaatgtgcctgagattcaaccccagcaacgatttttccctgtccccaatctgaacaagcactgttccggccttgggcgccttgtaccagcagtgatatagttcgccgccagttcggtccgcccagcccacgtggccaactattgcgcaacggttgcaaacgtttgtcgcaagcgtggtgtctgagtgagaggctgcatcccaaggagtttagatgagtgccgataacgcctacgcggtcgagctgaagggactgaccttcaagcgcgggacgcgcagcatcttcaataacgtcgatatccgcattccgcgcggcaaggtcacgggcatcatggggccttccggttgcggcaagaccacgctgctgcgcctgatgggcatgcaattgcgccccagtgcgggagaggtgtgggtcaacggccagaacctgccgacgctgtcgcgcagcgatctgttcgatgcacgcaagcacatgggtgtgctgttccagagcggtgcgctgttcaccgatcttgatgttttcgagaacgtggcctttccgctgcgggtgcatacccagctgtccgacgagatgattcgtgacattgtgttgctgaaactgcaggccgtaggccttcgcggcgccatcgacctgatgcccgatgaattgtctggtggcatgaagcgccgtgtggcgctggcgcgtgccattgccctcgacccgcagattctcatgtacgacgagccctttgtcggccaggaccccatcgccatgggcgtgctggtgcgtctgatccgcctgctcaacgatgcactgggcattaccagcatcgtggtctcccacgatcttgcagaaaccgcgagcattgccgattacctctatgtagtgggcgatggtcaggtgctggggcagggcacgcccgaagagctgatgaacgccgacaacccgcgcattcgccaattcatgaccggcgatcctgatggcccggtgccttttcactttccggcagcggattaccgctcagatcttctggggaagcgctgatgcgcaagacatctcttatcgagaaggttcgccttttcggtcgctcgggcatcgacatcgtcgaagtgctgggtcgttcgacgattttcctgttccacgccttgctcggccgcggcggtattggcggcgggttcggcctgctggtcaagcagctgcattcggtgggcgtgatgtccctggtgatcatcgtggtctccggggtgttcatcggcatggtgctggcgttgcagggcttcaatattttgtccagctacggttcggagcaggcagtggggcagatggtcgccctgacgctgttgcgtgaactggggccggtggtgaccgccttgctgttcgccgggcgcgcgggttccgcgttgaccgccgaaatcggcaacatgaagtccaccgagcagctgtccagtctggaaatgatcggcgtggacccgctcaagtacattgttgccccgcgcctgtgggccggcttcatttccctaccactgctggcgatgatcttcagcgtggtcgggatctggggcggttcgtgggtggcggtggactggctgggcgtctacgacggctcctactgggccaacatgcaaaacagcgtgaccttcagcggtgacgtgctcaacggcatcataaagagcatcgtcttcgcctttgtggtgacctggatcgccgtattccaaggctacgactgtgagcccacttcagaagggatcagtcgcgccaccaccaagaccgttgtgtacgcctcgctggcggtactgggccttgacttcattttgaccgccttgatgtttggagatttctgatgcaaaaccgcactgtggaaatcggtgtcggccttttcttgctggctggcatcctggctttactcttgttggccctgcgcgtcagcggcctgtcggccagccccaccgccgacacttataaactttacgcgtacttcgacaatatcgccggtttgactgtcagagctaaagtgaccatggccggtgtgaccatcggcaaggtcacggcaatcgatctggatcgcgacagcttcaccggccgagtgacgatgcagctggacaagaaggtagataatctgccgactgactcaactgcatctatcctcactgcgggtctgctgggcgagaaatacatcggtgtcagcgtgggtggggaaacagccctgctcaaggatggctcgacaatccacgacacacagtcgtcgctggtacttgaggacctgatcggtaaattcctgcttaatacggtcaataaagacgccaaatgaggaatctgttcatgatctctaccttgcgacgtggcctgctggtgctgttggcagcgctgccgctgatggctaacgcggcaggttctgcgcacgatctggtgcaggacacgaccagcaaaatgctggctgacctgactgccaataaagagcagtacaagcaagatccgagtaagttttacaacgcgctcaacaccattgtcggcccggtggtcgatgctgaaggcatttcccgcagcatcatgacggtcaagtattcgcgcaaggcgacccctgcgcagatgcagaccttccaggaaaacttcaagaaaggcctgttccagttctacggtaacgcgctgctcgagtacaacaaccagggcattaccgttgcgcctgccggtgatgagtcgggtgatcgcaccagcgtcaacatgagcgtcaagggtaacaacggtgccgtctaccctgtgcagtacacgctggagaaggtcaacggtgagtggaagctgcgcaacgtgatcatcaacggcatcaacatcggcaagctgttccgtgaccagttcgctgatgcgatgcagcgtaatggcaacgacttggacaaaaccatcaacggttgggccggtgaagtcgcaaaagccaaggaaacatccgataaagaagccgggaagtctgcgcaatgaccgagtcggctgttcgtcttggcgacgccggtgagttgttcctcagcggcgtgctggattaccgcacagggcctgagctgcgcaagcagggtcaggcgctgatcaaaactagcactgcgcccgcgctggtgctggattgttcggccgtgaccaagtccagcagcgtcggcttgtcgctgctgctgtgcttcatgcgtgacgccgaagcggcaaaaaaaacggtcagcattcgggcattgcccgaagacatgagtgaaatcgccgaagtttccggtctgaccgagctgctggcgcatccttaataaacattattaaagaagccccccgtcagagtcctgctatgcggggttcgcaggcgcggggcttttttgtatgatgtgcgacccgcgcgcactgggcgccgatagaggttgagcatgcaggccctagaagttaagagctttcttgaaggaaagctgccggaaacgaccgttgaagttgaaggcgaaggctgcaacttccagctgaacgtgattagcgatgaactggcggcactcagcccggtcaagcgtcagcagcagatctatgcccatttgaacccgtggatcaccgatggcagcatccatgcggtcactatgaaatttttcagccgcgcggcctgggccgagcgcacctgagcccccaaggcgtcgagattcttatggataaattgattattaccggcggtgcccgccttgatggcgagattcgcatctccggtgcaaaaaactccgccttgccgatcctggcagcgaccctgctgtgcgatggcccggttaccgtagccaacctgccgcacctgcacgacatcaccaccatgatcgagctgttcggtcgcatgggcatcgagccggtgatcgacgagaaactggccgtcgaaatcgacccgcgcaccatcaagaccctgatcgccccgtacgaactggtgaaaaccatgcgtgcgtcgatcctggtgctcggcccgatggttgcccgtttcggcgaagccgaagttgccctgcctggcggttgcgccatcggctcgcgtccggttgacctgcacatccgtggcctcgaagccatgggcgccgttatcgacgttgaaggcggctacatcaaggccaaggcgccggaaggcggcctgcgtggtgccaacttcttctttgataccgtcagtgtgaccggtaccgagaacatcatgatggccgctgccctggccaaaggccgcagcgtcctgcaaaacgccgcgcgcgagccggaagtggtcgacctggccaacttcctgaacgccatgggcgctaaggtttccggtgccggcaccgacaccatcaccatcgatggcgtagagcgtctgcataccgccacctacaaggtcatgcctgaccgcatcgagaccggcacctacctggttgccgctgccgtcaccggtggccgcgtcaaggtcaaggacaccgatccgaccatcctggaagcggtcctggaaaaactgcgcgaagccggtgcagaaatcaccaccggtgaagactggatcgagttgaacatgcacggcaagcgtcccaaggccgtcaacgtgcgtaccgctccgtacccggcgttcccgaccgatatgcaagcgcagttcatctccctgaacgcgattgccgaaggcaccggtgccgtgatcgagaccatcttcgaaaaccgcttcatgcacgtgtacgaactgcaccgcatgggcgcgaagatccaggttgaaggcaacaccgccatcgtcaccggcactgagaagctcaagggcgcgccagtcatggccaccgacctgcgggcttcggccagcctggtgatctcggcgctgatcgccgaaggcgacaccctgatcgaccgcatctaccacatagaccgtggttacgagtgcatcgaagaaaaactgcagatgctcggcgcgaaaatccgccgcgtaccaggctagttgccgtttgtagtgagcgggcttgccccgcgctggactgcgcagcagtcccttttttggggtcgctacgcaacccagcgcggggcaagcccgctcaccacaagaaggtgcctgccgttgaataagcagcatgctgaacttgtttcaaatcgaggctgtaatggcctcgatctgtgtccggcgccgtttgcgaccggaccgcaatagcctgatgaaggactgacgtttcccatgttgaccatcgcactgtccaagggccgcatccttgacgacacgttgccgcttctggctgaagcgggcatcgtgccgaccgagaatccggacaagagccgcaagctgatcatccccacgacccaggacgacgtgcgcctgttgatcgtgcgggctaccgacgtgcctacctacgttgaacatggcgcggccgacctcggcgtcgccggtaaagacgtgctgatggaatacggtggccagggcctgtacgagccgttggacctgcgtatcgccctgtgcaagttgatgaccgccggccgtgtcggtgatgtcgagcctaaaggccgtctgcgcgttgcgaccaagttcgtcaacgtcgccaagcgttactacgccgagcaaggccgccaggtcgacatcatcaagctctacggctcgatggagctggcgccgctgatcggcctggctgacaagatcatcgacgtggtcgacaccggcaacaccctgcgcgccaacggtcttgagccgcaagaattcattgcagacatcagctcccgcctgatcgtcaacaaggcatcgatgaagatgcagcacgcccgtatccaggcgttgatcgacaccctgcgcaaggcagtggagtcgcgacaccgcggttgacttacccgcgcggcctcaggtcgcgcccgtctatccgcctcatagccagaattctcaggtgcccaagcggatcgactgctaactttcggcgcctgagcatttttgccaatcctatgaggccctcgctatgaccacgtccactgcaattgcccgactcaacgctgccgacccggatttcgcccatcatctggatcatctgctgagctgggaaagcgtgtccgacgattcggtcaaccagcgggtgctcgacatcatcaaggccgtgcgtgagcgcggtgacgcggcgctggtggacttcacccgtcagttcgatgggctggacgtcaagtccatggctgacctgatcctgccccgtgaacgcctggaactggccctgacgcgcatcaccgcgccgcaacgcgaagccctggaagtggcggccgcgcgtgtgcgcagctaccacgaaaaacagaagcaggactcctggagctacaccgaggccgacggcaccgtgctggggcagaaggtcacgccgctggaccgcgccggtttgtacgtgccgggcggcaaggcttcgtacccttcgtccgtgctgatgaacgcgattccggccaaagtggcgggcgtgaccgaggtggtcatggtggtgccgacgccgcgtggtgaaatcaacgagctggtgctggccgctgcctgtattgccggagtcgaccgcgtgttcaccatcggtggtgcccaagccgttgccgcgctggcctatggcactgaaagcgtaccgaaggtcgacaaagtggtcggccccggcaacatctacgtcgccactgccaagcgccatgtattcggccaggtcggtatcgacatgatcgccggcccttcggaaatcctcgtggtgtgcgacggccagaccgacccggactggatcgccatggacctgttctcccaggccgagcacgacgaagacgcccaggcgatcctggtcagcccggacgctgagttcctcgataaagtcgctgccagtatcaataagctgctgccgaccatggagcgcgccgaaatcatcgaaaaatcgatcaatggccgtggtgcgttgatcctggtgcgcgacatggagcaagccatcgaggtggccaaccgcatcgcgccggagcacctggagttgtccgtggccgacccacaagcctggctgccgtcgatccgtcacgccggtgcgatcttcatggggcgccacaccagcgaagccctgggcgactactgcgcaggcccgaaccacgtgctgccgacttccggtactgcgcgtttctcgtcgccgctgggggtgtatgacttccagaagcgctcgtcgatcattttctgctcgccgcagggcgcttccgagctgggcaagactgcctcggtgctggcccgtggtgaatccctgagcgcgcatgcccgcagcgccgaataccgtatccttgaagagaaggggaactgagacatgagcaaattctggagccctttcgtcaaggacctcgtgccttacgtgcccggcgagcagccaaagctgaccaaactggtcaagctcaacactaacgaaaacccctacggcccatcgcccaaagccttggcggcgatgcaggccgagttgaacgacaatctacgtttgtacccggaccccaacagcgacctgctcaagcaggctgtggccaagtactacggaatcgacgctggcaaagtgttcctcggcaacggttccgacgaagtgctggcgcacatcttccacggtttgttccagcacgacctgccgctgctgttcccggacatcagctacagcttctacccggtgtactgcggcctttatggcatcaaatccgacccgctgccgctggatgaccagttccagattcgtgtggcggactacgccaagcccaacggcgggatcatctttcccaacccgaacgcgccgaccggttgcgtactggcgctggacgcggtggagcagattctcaaggccagcccggattcggtggtggtggtcgatgaagcctatatcgacttcggcggtgaaaccgcgatcagcctggtggatcgctacccgaacctgctggtgacccagaccctgtccaaatcgcgctcactggccggtttgcgggtgggcttggccgtgggccacccggacctgatcgaggcgctggagcgggtcaagaacagcttcaactcctacccactggaccgcctggcgattgttggcgcggcggcggcgttcgaggaccgtgagtatttcgagaagacttgccggttggtgatcgacagtcgcgacaagctggttgcgcaactggaagagaaaggctttgaagtgctgccgtcggctgccaacttcatttttacccgtcacccacggcacgacgccgctggcctggcggccaagttgcgtgagcaaggggtgatcgtgcggcacttcaaacaggagcggattgcccagttcctgcggatcagcatcggcacgccggagcagaaccaggcgttgatcgatgggctgggccagctctaacaagcgctgaaatcaaatgtgggagggggcttgcccccgattgcggtgtatcagccagctaatgcgttgactgacacactgctatcgggggcaagccccctcccacattgggttctacggtgtgggttagatcaacggctcgtcagacttcttgttcttccagccatcattgcccggcagcagcaggttcaacccaatcgctaccaccgcacacagggcgatacccttgaggccgaagtcatccgggccggtgccggtaccgaccagcacaccgccaatcccgaacaccaacgtcaccgacacaatcaccaggttgcgcgcttcgcccaggtcgatcttgtggcggatcagggtgttcatccccaccgcggcaatcgagccgaacagcaggcacagaatcccgcccatcaccggcaccggaatgctctgcagcaacgcgccgaacttgccgatgaacgccaggctgatggcaaacaccgctgcccaggtcatgatcttcgggttgtagttcttggtcagcatcaccgcgccggtcacttcggcgtaggtggtgttgggtgggcccccgaacaggccggcagccgtggtggcaataccatcacccagcagggtgcggtgcaggccgggcttcttcaagtagtcgcgaccggtcacgctgcccaccgcaattacaccgccgatatgttcgatcgccggggccagggccaccgggacgatgaacaggatcgcctgccagttgaattccggcgcggtgaagtggggcagggcgaaccagggggctgccgcaatcttcgccgtgtcgaccacgccaaagtagaacgacatggcaaaacccactagcacgccggagataatcggcaccaggcggaaaatgcccttgccgaacaccgccacgatcaaggtggtcagcagcgccggcatcgagatcatcatcgcggtctggtaatggatcagctcagcgccatcaccggctttacccatcgccatgttcgcggcaatcggcgccatggccaggccgatggagataatcaccggcccgatcaccacgggtggcagcaaccggtcgataaacccggtgcctttgatcttcaccgccaggcccaggaaggtgtacacgaaacccgccgccatcaccccgcccatggtcgccgcgaggccgaactggcctttggcgagaatgatcggggtaatgaaggcaaagctcgacgccaggaataccggcacctgccgccctgtcaccacctggaacagcaacgtgcccaggcccgcggtgaacagtgcgacgtttggatcaagacctgtgatcagcggcatcaacaccagcgcgccaaatgctacgaagagcatttgtgcgccagacaggatctggcgccaaagcgggtcgttgaattcatcctgcatgctcacgcgtccttctgcttggtgccaaagatcttgtcaccggcatcgcccaggcctgggatgatgtagccgtgttcgttgaggcgctcgtcgatggaggcggtgtagatctgcacatccgggtgagccttctcgacggcagcgatgccttcgggtgcagccaccagcaccatggcgcggatatccttgcagccagcttttttcagcaggtcgatggtggcaaccatggaactgccggtggcgagcatcgggtcgatgatcatcgccaggcgctcgttgatttccgggacgagtttttccaggtaagtgtgggcctgcaaggtttcttcgttgcgggccacgcctacggcgctgaccttggcgcccgggatcaggctgagcacgccttcgagcatgccgataccggcgcgcaggatcggcaccacggtgattttcttaccggcgattttctcgacctgcacgggaccggcccaaccagggatttcatagctctccaagggtaaatccttggtcgcttcgtaagtgagcaacgctccgacttcctgagcaagctcacggaagttcttcgtgctaatgtcggcgcggcgcataaggccgagcttgtgtcggatcagcgggtggcggatctcgcgagtgggcatgggaaaggctccggcggcgggcaaaaaaaccggcctagattaatctatccgagggtgttgtcctatagacatctagtacgttagtccattaaggcttgctcggagcgcacgagaagcgtaccttcgcccgcttttcttgccacagcacccccttggagagcgccatgtccgctgatctcgagcatatccgtcaaatcatgcgcgaggctgactgcctgtacaccgaagcgcaagtcgaagaagcgatcgccaaggtcggcgcacacatcacccgcgaaatggccgacaccaacccggtggtcttctgcgtgatgaacggtggcctgattttcgccggaaaattgctgacccacctgcaattcccgctggaagcctcctacctgcacgccacccgctatcgcaacgaaaccagcggcggcgacctgttctggaaagccaagccggaagtctcgttcatcgaccgcgacgtgctgatcatcgatgacatcctggacgaaggtcacaccctgggtgcgatcatcgacttctgcaaacacgccggcgcgcgcaaagtgcacaccgccgtgctgatcgacaaagatcacgaccgcaaggctcgcccggacctgaaagccgattacgtcggcctgccgtgcattgaccgctatatcttcggttacggcatggactacaaaggctactggcgcaacgccaatgggatcttcgccgtcaaagggatgtaagtcatggcccgttttcttgatcagacgctgtttgccgaactggccgagaaagcggccgccagcccccgtggccggcaccaccataacttccaccagatggaagagccttgtcatcgcctggcggtgggcctgcaacctgacacctatgtgccgccgcatcggcacctgagtgcggacaaggcagaaaccttgctggtgctgcagggccgcttgggcttgctggtcttcagcgaaaccggtgaggtcattgccaagcgtgtcatgcaggccggcggtgaatgcgctggtgtggatctgccacccggtgtcttccatggcctggtggtgttggagcccgacacggtgatgttcgagtgcaaggccgggccttatcgtccggtgggcgagggcgaacaggccgattgggcaccccgcgaaggcgaggccggtgtggccgagtaccaacgctggatgcttgcccagttcgattgagctacagtgctgggcccaccttgccggagcggcccatgagcctgttgatacgcacctgcgccgccctggcgctgaccctcagtttgcccctggctgccgcgcctgcgccgatgcacagccaattcctgccttcggacgacctgactctgcgcgctgaagcgccggaccagcagcaattgctgcaagtcaccgagtacgcggtggtggtgggcaaccagcgccagtccagccaacaacccatcccggtgactgcgccgttgatgattcgcctgaagggcaagtccctgaacaaaggcgcgaccatcgcccaggtggtgctcaatttcgacgctgaaagcaaaagcctgaaaaagccggcctacgatgacaagagcaagactttgaccttgtcctacccggtggcccaataccgtgtgattgttgacctgttgcgcaatgacacggtgtatgtgcagttcctcagttatgccaatgggcatatctgggcggatttgcacactggtgcggtgcgtacccaatagcaagaacactgaaaagccaacgtgggaaggagcttgctcctgattacggtggggcggtcaattagatgtcgcctgacactccgccatcgggggcaagccccctcccgcattgaatctccagcgctttcgaagcctgcgtcgcacaggtagacttcaaaccccgtgtaaatgtctgcaggctggagtcggtaatgcgtaaagataagaaacaggtgattggtgacgagatcggcgacgatcagatcaagttgttcctggacttcgagccggtcgacgcgacttccccgtccctgcacaaactgatcaaggcctaccgtggcctgcgtatcgacgatttcgagcggttcctgggcttcttcaaggaagccggcctggacctcgacggcaaggatgagcatggccagaccttcgtcgacctgatcaaggaccagcgcaacgcggacgagtacatcgaactgatcgaaaacgctcgcggctgattatccaagccacaaaaaaacgccccgttctcaggttgagagcggggcgtttttcatggcgcctcaagcgtagctttcggtctcggcggcaggttcaaccagttccaggctgatgttgttctgcgcgttgatcttgcgatacaactcggcatccgtttccaggaccttttcacgggccgggaagatctcgtgcagtttggcagcccactcaccggcggctttttccgggaagcacttctcgatcagttccagcatgatcgaaacggtcaccgaagcacccggggacgcgcccagcagcgccgcgagcgtgccgtctttggccgcgaccagctcggtgccgaattgcagcaccccgccttttttcgggtctttcttgatgatctgcacccgttggccagccacttccaggcgccagtcttcggctttcgcctcagggtagaagcggcgtagggattccaggcgctgttccatggactgcatcacttcgctgaccaggtacttggtcaggtccatgttgtcgcgggccacggccagcatcgggccgatgttgccggcgcgaaccgacagcggcaggtcgaggaacgagccgtgcttgaggaacttggtggtgaagccggcgtatggcccgaacagcagggatttcttgccatcgaccacacgggtgtccaaatgcggcacggacatcggtggcgaacccacggcggcctggctgtagaccttggcctggtggtgcttgaccacttccgggttgtcgcaacgcagccactggccgctgaccgggaagccgccaaagcctttgctttcttcgatgcccgaggcttgcagcagcggcagtgccgcgccgccggcgccgaggaacacgaacttggcatcgacttcacggctgttgccgctgttgacgtccttgatgctcacggtccagcccgcgacgttgcgcttgaggccggtgacgcgtttgctgtacttgacctgggcgtctgccgagctggtcaggtggctgagcagttggttggtcagggcgccgaagttcacgtccgtgccgttcatcacacgggtcgccgcgattttttcgtcgagcggacggcccggcatcatcagcggcatccattcggccatctcactgcggtcttcggtgtagtgcatgtccgagaacgcatggtgctggctgaggctttcaaagcgcttcttgaggaaggacacgcctttttcgccctgcacgaagctcaggtgcggcaccgggctgataaaggacttggacgagccaaaggtgccctttttggtcaggtacgcccagaactgcttcgacacctcgaactgggtgttgatgtgcacggctttcttgatgtcgatggagccatcggcggcctgcggcgtgtagttcagctcacacagcccggcgtggccggtaccggcgttgttccacgggttggaactttccgcggcacccgaatccatcagctcaacgacttccagcttcaggccggggtcgagctctttgagcagtacggccagggtggcactcatgatgccggcccctaccagtactacgtcgactgcttcgttatgcgccatttaacgcgtctccaaaatctgctgcaccaaattgacggcatggctgccaggagtgacggggcggttcacgtgttgccccaggttacccatggccaggatcgccatgtccgattcgcaattctttgcatgttcagcgcacgcttcctgccgggctaatctacctatgaacgcattcatgggcgcctgtggcaattcgacttatggtcaaagcgtgcgattcgtgcaaccaatccgtagcggacaggctcaagctccggtttttaaggcgtgctcggtcctgtgtggttgggctgttccagacgctgatggtgcttgtacaaacgccaaactattcatttgctcgccacactcttgtgaagttgtgaaaacccgttttttcacgctcttttgaagacgtgaacctcaaaaaagggctgccccagcctggcacctggcccctagccgacacgcggcaaaacgggcaaacaactcaagtggccgagcgcaatggcagctctggcagattcggtaaaggcgggtggtttgcaaagaaaacagcaagcgcgccagcttcactcgatctgtgtgggcggctctctgtgggcgattcttggggctaatgccgaggcattaacgatgctgcgaggcccgatcaggagacgtccttataatcggggggagattgtagcgaagaacgccagggaaatgggcgtgttttatgacttttattagccgttcggtcaggcggccaacggttggtgatgcgacggctgcgctgcacgtgggctgacacgggcgctggctggcagcgggtggtgcatccagctcaggcggatttcatcgatttccacccagccgtcgcctacaggaggctggcagcactctttgaaggcctggcaacggccttgcacatcgagcagggcgaactggcgaaggaccggtttgcgcgtgaacagtgaccagagaaattgcatggcgacagacctcttgagattgaggccaagcttgcctgtcgggcatgacgggcctgtgtatcagccgtgacatatcagtgacatcgaaccgctacagtctgtgcaggtctcaggttgtaactggcgctagttcccggcactggcgcaccgctatactgcccgcctgtcggtacccgatttctggagagaagagcatgttgcaacgcctgttgttcggtttgatcactgtgaccagtttgaccctggttggctgcgccaacagcccgcaacaactgaccccggaaccaaaaatcaccacgcagttggcccccgtgggtcacggtcagccagtgtcggtgcgtgtggtggatggtcgtccgtcgcctacgctcggttcgcgcggcggcctgtatccggaaaccgccctggtctcggtgaatgcgcaagacgtgctgcccaagctgcaggcccaggccgaagcagccgtgcgcctgttgggtttcaccccgagcgccaacgcgccgggcgctccgcagttgacgatcaccctggccgaattgaagtaccagtcgcctaaagacggcctgtacgtgaccgaagcgtccatcggcgcgacgttcaagtccgacgtcaccgccggcacccgtcgctacagcggccgctacggtgcgtccctgaaccagcgtttcggtatgtcgccgaaccaggaaaccaacaccaagctggtcagcgacgtcctgagcgacgccttgacccgtctgttcaaggacccaagcatcggttcgctgctcagctcgcaataaccgattctgtaaaaaaaaccgggctcatcattgagcccggttttttttcgtcttcagtttcatgcggccgtgtcgatacagaaatccagcaggctcaccccggtcaacagatcggcctccggcaggtcggcatgctggtgtccgccgagggcgcaatacaccagccagtggcggtcctggacgttgaaggccaggccgccgatcagcgcttcctgctcatcgctctgggcgatcagatacagccgatcctggttttgtgcatgcagcatgacaagctcctaaagcgtcgaagggcaacagagtggcttgttaaggtgacgttcaggtgacgttgtaaattactggatacattagccgtcaatgggggagggagcatttcaggcgccggaggccactatcgttcaggtttgtatctgaaccgataccaaaacactgttttgccgaggtttttgatggcgctgcccgcactgttgaccaatgttgttgctttggccgtggcctgtccgggcgcggcgctgctgttcattacccgtctgcgcgaacagcgcgccatggctgacctgaccgcgcagagcgaagatcgcgcaattgatcagccgatgttgtttctggatgtgcgcaccgaacgggcgcatcgtctggcttaccgcgtcggtttcgcctgcctggggttggcgctggccatttcctggctcagcacccgcctttaagaacaccacaaaacaaatgtgggaggggggcttgcccccgatgacggagcttcagtcgacagctgattgactgatacaccgctatcgggggcaagccccctcccacatttttgaatcggtgtttagaggggtattccagccttgacccgatactgattacgcaccggcgtcgcatattgcaccaccaggaacggccggtgctcagccgggcattcgttcaaacgccgctcccactccgccttcgccttggccagttcatcggccgggaatacttcggccgccgtcggcacctgcaattgcgggtcggcgtcgctccactgggcgtaggccaggtaatgcaccgggaacaaccggtagccccccagaatctgccggtccatttctgcggccagcaacttggtgtcttcgaaacgctcggtaatcggcggcgcgaagttaatgtgcacgcgtcccttgtagccggtgatgcccagggcaatgctcacatcgtcttcgccctgcgccttgacgtaggtgccggtggtagcacggatgtacagctcgcgggccttggctgaatcacatgggtcgtattcgtagctgatggacaccggcgtcaggttcagcgactggatcacctcggcaaacggctcgtccttgcggctgacatggaacatcttgaggatcgccgactcggtacggtcatctccatccttggcgcgcccttcggcctgggcgatccagatcgacgcaccgtcgttgcggatcgaatggttgatgtaggccgacagcaattgataggccgccatcttctctttgcgcccggtgatcgagcggtgcacgatgaaactcttgttcaggcgcatcaggtcgctgacaaacggcttttgcagcaggttgtcgccaatggcgatgcggggtgtcggcaggccggcgtggtacaccgcatagttgacgaaggccgggtccatcacgatatcgcggtggttggccaggaacaggtaggcggtgccggacttgagctgctcgaccccggtgtaagtcacgccgtcggtcgcccggtcaatggtgtggtcgacgtagtactcgactttgtcctgcagcgtggccacggtggtgacgccggcgaattcacggcgcagtttgcgggcgatcatcggcttgagcagccagcccagggcgccggcaaagcgcgggaaacggaagtgggtcaggatgtccagaaaggccttgtcactgaacagacgtgccagcactgccgggacttcgctgtcattgtaaggtcggatggtatcgaattcgcccatcatgctctcttgttagaaacggctagggtaagtaaaggaaataccagggtgcggcccgagtaatgggctcggccaaaaatagccctgtaaatagaccggcgattatacgcacaagtcaccttggaggctgcgatgctggaaagcgcgacgtacgattgtccttattgcggtgaagaggtcgagacaacggtggatttgtccgggggcgatcaggtttatatagaggactgccaggtgtgctgccgaccgatcattttcgatctgcaggtgcatggcgaagaatggatgcttgaaacccgtagtgaaaacgaatagcgggggcgctgatgcaacgaatctacgaaccggaaaacctgatggaaggcgagttgctgcaacagatgctcgccagtgaaggcatcgaggcgcacctggtggggcggcatttgctcggtggcaccggcgagttgcccatcttcggcctgctggggctggaggtggacaatgaccgcgccctcgacgcccgcgagttgattaccgcctatatcggcgcgcaaccgctgccgggcgacgaacccgacagcttccccgacgtgctggtctgttaggctgtcggtcggtttacccaagagtcgtgttgccccatgtgtggacgttatgccttgtttcgctggacccccgcttttgctgccctgccgggctttccggccgatcagcaggcccagtggaacatctccccgaatgattcggtgctgatccagcgcgccgccgacggccagcgcaccctggcccgcgctcgctggggcctcaccccgccctggctgactgatctttcccgcactcccgcccacgcccgcgccgaaaccctggccgaacagccgatgttccgcgaagcattccgtcagcgccgctgcctgctaccggccaatgggttctacgaatggcgcggcacccagcgcaagcgcccgtattggctgacgccgggggagggctccacgttgttttttgccgcgatctgggaggcctatccggtgcaggaacaggtgtggttgagcacggccgtggtgacccaggccgcgcaggcccagcgtcggccactgattctggatgaggccgggcaggcagcctggctcgaccctgagacgccgttgcatgtgttgcaaggcttgctggccagtgagccgagcgcgttgcgcgagcgggtcctggccaacatggtcaatgatcccaagctcaatgggccggagtgcctgaccccggcttagaccttgaactgattgatcagccggcgctgctgctcggccaacttggtcaagtccgcactggccgcgctggattcatccgcgccgcccgccacttcattggccacctggccgatattgatcacgttgcgattgatgtcctcggccaccgcgctctgctcctcggcggcactggcgatctgagtgttcatgtcgttgatcaccgagactgcctgggtgatggtctccagcgcttcagccgctttggccgcatgttgcacgctttcatcggtgcggttctggctgtcctccatcacccgcaccacatcccgcgtgccttgttgcagttgctggatcatggtctggatttcttcggtggccttctgggttttctgcgccaggttgcgcacttcgtcggcgaccacggcaaaaccacggccttgctcgccggcccgcgccgcctcgatggcggcgttgagtgccagcaggttggtctgctcggcaatcccgcgaattgccgtgaggatggcgttgatgttttcgctgtccttggccagggtttgcaccacaccgacggccttgccgatttcctcggcgagcgcgccgatggaggtggaggtgtcacgcacgatgcgcatgccctggctcgcggcctggtcggcatggctggcggcctgtgcggcttgggtggcgttgcgtgcaacgtcttgcgcagtggcggtcatctcatgcacggcggtggcgacctggtcgatctccaccatctgtttgtgcacaccctggttggtacggatcgcgatatcagcggtgtgctccgaagagtcgctgaccttctgcaccgaactcaccacctgggtgatcatgccttgcagcttgatcaggaaggtgttgaaaccgttggcaatcgcgcccaattcgtcggcgcgatcactggtcaggcgccgtgtcaggtcaccctcgccctgggcgatgtcattgagcatcgcgaccatttgcttgagtggccgggcaatgccatggcccaccagccagatcaccagcaggccgataccggcgatcagcaggccggcgatagtcatgccgaaaatatcggtcttgcgctgggtttccaggtcgctttgcagtttctgcgagtcggccattaccgcactcaaaggcagctgcatcatcagggtccagcgtgcatcggtctggccgatgttgaacggcaggaacaactcgatatgcccatgttccttgtcgatgtcgtagcgtacttcgccgattttcagttggcccaggttggccagttcgttgccatcgagcaggtcgctggccttttcgccgagcttgctggcgtccttggtataagccaccaaacgcccgttgctggagatcagcgccagttctccggcaccgttgtagagtttctggtcggcgctggtgagcatgtcctggatgaagttcaccgacaggtcggcaccgacgatgccctggaacgtgccgtcgatcatgatcggctcgataaacgacgccagcatcaccatcgcgttgcccaccttgtaaggggccggatcgatggcgcaggcctttttgctttccttggagcacaggtagtactcgctggcgcgcacgcccgtagagaggattttctggtcggccacgtccgccagcttatccatgcccaggctgccatctgcattgcggtaccaccacggcaggaaacgtccgtcggcgcccatgccgacaatcgggctgttcacgtaggccgcgtcgttgtgatcgatggcgttgggttcccagccgatataggcaccgaggattttggggttgcgcaccacggtttcgtgcagcaggttgatcagttgctcgcggccgagctgcagggcgggttcacccttcgcgtctttcatgccgagcagggcgttggcagtggccaggctcttggcggtcaccagtggcgcttccagttcgcgctggatcaaggtggcctgggtttgcgccagggcggtgaggcgctgttcgataatctgttcgaactgcacttgggtacgctcctgcaccatttcctgggtgcgtgcgccggcaaacaaggcgtagagcaccaacaccgctactacgctcaggacaatggcgccggccagtgccgcgacagaaaattgaatcgacttgaatttcatgaaaactccgggcgcaggggagagggcctgtcttgtgtatcggccgagggcgaggtgggcatgaggggggcgcccggcaaaatcgggggatgtgtcgcaaacagaatgctcggcgccgccgctggcgtgtgagatgtatcggaaaatcagcggttacacgtctggtgtatctggcgtcgatacaaatgtgcgcctacgatacgcgccatgttttaagggcgtgttttcagggagagtgttgatgaagaagtcattggtgataagcgggttggctgcagcgctgctgctggccgggtgtcagtcggtcaacaccaccagcggcggtgccgttggggtggaacgcaagcagtacatgttcagcatgctgtcgagccaggaagtcgaccagatgtatgcccagtcctaccagcagaccttgggtgaagccagtggcaagggcctggtggacaagaccagcgccaacgccaagcgcgtgcaggccatcgccaaccgcttgatcgcccaggcgccgacgttccgtgcggatgcggcacagtggaagtgggaagtgaacctgatcaagagcgacgagatgaacgccaactgcgggcctggcggcaagatcttcgtgtacagcgcgttgatcgacaacctcaagctcaccgatgacgaactggcggccgtgatgggccatgaaatcgcccacgccttgcgcgaacatggccgcgaagccatgtccaaggcctacgggatcgaaatggccaagcagggcgccggtgcgttgttcggcctcggccaggacagcctggcgctggccgataccgtggccaactacggcatgaccttgcccaacagccgcagcaatgaaaacgaagccgacctgatcggcctggagctgtcggcccgtgccggctacaacccgaacgctgccattacgctgtggaacaaaatggccaaggcctcggaaggtgcgccgccggagttcatgagtactcacccggcctccgacagccgaatcgcctcgttgcaggcggcgattccgaaggtgatgccgttgtaccagcaagccaagaagtcctgacgttgtgaagatctaagtgtgggagggggcttgcccccgatgcgttgggtcagcccattagatgcctactgacactccgccatcgggggcaagccccctcccacagggcccctttagatccagccgctgctttgcatggctttgtacacggccacgatagccaggatgaaaaacgccgtagccgccaaccgacgaatcaacgtcaacggcagtttctccgccgcaaaattccccgccaataccaccggcacgttggcaatcagcatgcccaaggtggtgccgataatcaccagccacaactccgggtactgcgccgccagcatcaccgtggcgatctgcgtcttgtcaccgatttccgccaggaagaacgcgatcagcgtggtcaggaacggcccgaatttgcgcgtggtgctggcttcgtcatcgtcgagtttgtccggcaccagggtccacagcgccgtggcgcagaagcttgccgcaagaatccagtgcaacaccgcgtccgagaagaaacttccgaaccaggctcccacggcaccggcggctgcatggttggccagggtcgcggcaacgatgccggcgatgatcggccagggtttgcgaaagcgtgcggcaaggatgagcgcgagcagttgcgtcttgtcgccgatttcggccaaggcaacgattgcggtaggaacgagcaatgaatccagcatcaggtaggtttccaggggcgggtcgacacggctatgacacgtacagccttcccgccccgggtaaggtgtgcgtgtcataggtcttgtcaaaccccggtccgtctgtgcggactcctgggtcgcatacgccatggtctgctgaccaagtatgttgacgtatgccggacgagcgtggcgctcgtgggagactactcccctaggacggagcggattctgcctaggcaaaacccattcggcaagcgttctttttcaaacgcccgtcagccgcgcttggcgcggtagatgcgaaaaccgttgccttcagcctttactccacacacgcccaagtgctcttcgatcagcggctggtacttcaggaaactgttggcgaccaggcgcagttcgccgccttttgccaggtgtttcgctgcttttcgcagcaggttttcggtggcgaaataatcggtatgcaccccgacatggaacggcgggttgctcaaaatcgcgttcaaacccatcggcgccgcgtcgataccgtcacccgtcaatacttcggcttccagaccgttggcagccagggtcaggcggctgctcgcagcggcaaaggcgtccacgtccagcatcgtcacgctgttatgcgggtagcgacgtttgaccgcagcccccagtacaccggcaccgcagccaaaatccagcagatgcccgctcggcagtttgtccaggtgctccagcaacagctcggtgccgcgatccaggcgaccgtggctgaatacccccggcaagctcaccaccttcagcgggccttcggccaatggcacctcgaaaacctgcgccaggctttccagttcgaccgcttgcggcgcattggccacggtgacctgccacagctggcaatgccgtgcgttgtcgagcttgcgcggcttgccaaaggggatcatctgcttggccgcgctttcgataccggcctttttctcgccgaccaggaacagctcggcgccgggcaggcgtgcagccacggcgttgagcaggtagtcggtcaggtccttggatttgggcaggaagatcaccgccgcatcgaacgcccgctcgggcacattgacaccgaagtggctgcgctcggcaaagcgtgcatcgagcgccgcctggtcgccggcatgccagctccagccgtgggcgttgggcaggcgaccgagcaggtcgtcggcgggcaagcccaccaacagcaggttgccttgaaaaagttcggcctggcgaagcagtacttcactgcgcggatccatggtctgctccttgaaaaggggcgcagtttatcaactgacgacgcgcagcggggcgccgctgaaaaagccccgggcgttttccgccagttggccgacgatgcgctgccgcgcttcgcgactgccccaggcgttgtgcggggtgacgatcagccgcggaatatcgccggccagcagtgggttgccattcaccggcggttccacgctcagcacatcggtagccgcgccacccaagtggccgctactcaacgcatcggccagggcctgttcgttgatcaaaccaccgcgcgcggtgttgaccacaaacgcgccgggcttgagcaacgccagttcgcgggcgccgataaagtcgcgggtgtgttcattgagcgggcagtgcagggtgagcgcgtcgacctgcgccagcagttcatccaatggcacgcggtcggcgcgggcagggcgccccggaatcgcaccgagcagcacacgcatgccaaaggcttcggccaggcgcgccaccgcgccgcccagttcaccgtggccgagcaggcccagggtcttgccttccagctcgacaatcgggtggtccagcaggcagaactgcttggcctgctgccacaggccggcgccgacgtcccgttgataatccttcaagcgcgtcgccaggttgagcagcagcatgatcgtgtgctgggccaccgacggcgtgccgtagccctggcagttgctcacggtgatgccgtgggcgcgggcggcgtcgaggtcgacgttgttggtgccagtggccgacaccaggatcagattgagctccgggcaggccgccagggtttcggtgttgagggcgattttgttactgatcaccacttgcgcgccttgcacacgttcaaccacgttctgcgcagtggtgtccgtaaacaactgcaactcgctgaagctgttgcgcaattcgctgaggtcaaggtcccccaagtccagggaaggatgatcaaggaagacggcgcggcgattgttcgtcatcaactgtaccttttgcgacagggttcgaaggcgtaatctgccgagcctatcagatgaaataatccgttacttaatggagtgagtatgtacgccgccgagttcttgaccgtagccctgattcacttgttggcggtggccagccccggcccggatttcgctgtggtggtgcgtgaaagcgtgacccatggccgccgcgctggcacctggaccgcactgggcgtgggctcggcgattttcctgcacgtgggctactcgttgctcggcatcggcttgatcgtgtcccagtccatcgtgctgttcaacgcgctcaagtgggcggcagcggcctacctgctgtacatcggcttcaaggccctgcgcgcgcaaccggccaagccccccgttgaaggtgagttgcatcgcgaagcaggcgaacgtacgccgcgtggtgcgtttaccgccggttttgtgaccaacggcttgaaccccaaggccacgttgttcttcctgtcgttgttcaccgtggtgatcaacccgcacacgccgctggcaatccaggccggttacggcgtgtacctggcggtggcgacggcgctgtggttctgcctggtggcgatgttgttcagccagcagcgcgtgcgtgccgggtttgcgcggatgggccattggttcgatcggaccatgggcgcggtgttgattgcgattggggtaaagctggccttcaccagcatgaaataagctggatgctggcgcaaagctagcattcgctggggtctgcaaatcattcctttggctgatttggctgaaacataaggtctctaaagtgcaggtcttcaagccaagaccgtgcagtcagaaaagggattcgtatgttgcagacccgtgttatcccgcccgccgaaggtgcgtaccaatacccgctgttgatcaaacgcctgttgatgtccggcacccgctatgaaaagacccgggaaatcatctaccgcgaccaactgcgctacacctacccgaccctgatcgagcgcgtcgcccgcctggccaatgtgctgaccgaggccggggtcaaggccggtgacacggtggccgtgatggactgggacagccaccgttacctggaatgcatgttcgccatcccgatgatcggcgcggtgatccacaccatcaacgtgcgtttgtcgccggaacagatcctgtacaccatgaaccacgccgaggaccgcttcgtgctggtcaacagtgagttcgtggggctctaccaggcgattgccgggcacctcaccaccgtcgacaagaccttgctgctcaccgatggcgaggtcaagaccgccgagctgcccaacctggtgggggagtacgaaagcctgctggccgccgccagcccgaagtacgacttccaggatttcgacgaaaattccgtcgccaccactttctacaccaccggcaccaccggcaatcccaagggggtgtacttcacccatcgccaactggtactgcacaccatgggcgtggcgaccatcatgggcagcgtcgacagcgtgcgcctgctgggcaccaacgatgtgtacatgccgatcacgccgatgttccatgtgcacgcctggggcctgccgtatgtggcgaccatgctcgggctgaaacaggtctaccccggtcgctacgacccggaatacctggtggagctgtggcgcaaggaaaaggtcaccttctcccactgcgtgccgaccatcctgcagatggtgctcaacgccaaggccgcccagggtgtggattttgaagggtggaaaatcgtcatcggcggcagtgcgcttaaccgttcgctgtacgaagcgtccaaggcccgtggcattcagttgactgcggcgtatgggatgtccgagaccgggccgctggtgtcctgcgcccacctcaacgaagaactgatggccggcaccgaggatgagcgcaccacttaccgcatcaaggccggcgtgcctggcccgttggtggaagctgcgatcatcgacggcgacggcaacttcctgcccgccgatggcgagacccagggcgagctggtgttgcgtgcgccgtggctcagcgaaggctatttcaacgagccacagaagggcgccgagctgtgggccggcggttggatgcacaccggcgacgtggcgaccctggatgcgtttggcgtaatcgacattcgcgaccgcatcaaggatgtgatcaagaccggcggcgaatggatctcgtccctggccctcgaagacctggtcagccgtcacccggcggtacgcgaagtagcggtggtgggcattgccgacccgcagtggggcgaacgcccatttgccctgctggtagtgcgtgatggccatgtgataggcgctcgcgagctcaaggaacacctcaagccgttcgtggaactgggccacttgagcaagtgggcgattccgagccagattgcggttgttactgaaattcccaagacgagcgtaggaaaactcgacaaaaaacgtatccgtatcgacatcatcgaatggcaggccaacaacagcacgttcctgtctaccctgtgagctgactcgccgtgcccttgtggcgcggcaatgctctatctcgcgccttcacttgtgatttgccgattttcagccatccttgccgcgtcggcctttgtcgacatggcgaaagggtcgtggcagacgggtcggtgatgcaaatcacactttagagggatcaagcactaccccctgctggctatagtcccttccagagtttttcacggatgttccgcttcgggccatgggggctcggctgccgagcggcattggaatcgttgtattccggccgttacatgcatcagtaggaaaaaactcactgccataacaataatgcacatggagtagcgtcgatgacctcagtaaaccagttctggcgccgggcaagactgcccctggccgtcagtctcgcctctacgctcgccgggcccgcattcggcgtcagtttcaatatcggtgaaatcgaagggagttttgactcgtctctttccgtgggtgcgagctggtcgacggccaagcccaaccaggacctgatcggggtcaacaacggcggtaagggcctgtcccagacttccgatgacggccacttgaacttcaagcgcggggagacgttctcgaagatcttcaagggcatccatgacctggaactgaaatacggcgataccggcgtgtttgtgcgcggcaagtactggtacgacttcgagctcaaggacgaaagccgcccattcaaggacatcagcgacaacaaccgcaaggaaggcgccaagtcttctggcgggcagatccttgatgccttcatctaccacaactacaacattgccgatttgccgggcaacgtgcgcttcggcaagcaggtggtgagctggggtgaaagtaccttcatcggcggcggcatcaactccatcaacccgatcgacgtgtcggcattccggcgtccgggcgccgaaatcaaggaaggcttgattccggtcaacatgttctatgtgtcgcaaaccctgaccgataacctgtcggccgaggcgttttaccagttggagtgggaccagaccgttaccgataactgcggcacattcttctctcagcctgatgttatttccgacggctgcagtgacaatttgcgcgtgttgaacagtcgtcgcttcctgcctgccgcagtattgccagggcttgccgccaatggcgtcgacgtcaataacgaaggtgtattggtgcgtcgtggcccagatcgtgatgcgcgcgacagtggtcagttcggtgtcgcattccattacaacttcgagccgctggatacagaattcggcgcttacttcatgaactaccacagtcgtgcgccgatcttcagtgctcagggcgcaccgcaatcgaaatacacaggtgcaacgcctggtgtgccagcccaactgcgtccattggtggtcgcgggtaactccaactactacgttgaataccccgaggacattcgtctctatggcttgagtttctccaccaccctccccacagggaccgcatggagcggcgagttgagctatcgtcctaacgcgccggtacaactgagcacgacagacattctttttgccggtgtcacgccacttccccccttcaacaacgcgtctgtgttgaaggggacgccaggccaggacctgcacggctaccgtcgcaaggaagtcacccagttccagaccaccttcacgcacttcttcgatcaggtcatgggcgccagccgcttgaccactgtcggtgaaatcggcgtgactcacgtcggtggcctggaaagcaagtccgaggcacgttatggccgtgacccggtctttggcccgggttcgttgccaggtggtttctgcaacacgctcaacaactccacggcgcaagggggtggtttgcctaacgccgcgagcctgaacaccaactgcaacaacgacggttacaccaccgccacatcctggggctaccgcgcccgcgccatctgggaatacccggacgtgttcgccggcgtcaacctcaagccaaacgtggcgtggtcccacgacgtcaaaggttactcgccaggccctggcggtaacttcgaagaaggtcgcaaggcagtcagcctgggcctggatgccgaatatcagaacacctacaccgccagcctggcctacaccaacttctttggtggcaagttcagcacggtggatgaccgcgactttgtcgctttgagcttcggcgccaacttctaagcacactgcatttcaggaagaaccagaacatgaaaataaccaaaagtctgttgcacgtgggtgtgcttgggctgtcgatcctggcgagtaacgtcatggcggcagtctcggcggatgaagccgccaagctgggcacgagcctgaccccgatgggcgccgaaatggccggtaacgctgccggcaccattccaaaatggtcgccactgcccaccaacgccggcgccgtcgacgctcgtggattcctggccaacccgtacgccagtgagcaaccgcaattcaccatcaccgcagcgaacgtcgagcagtacaaggacaagctggcaccggggcagtacgcaatgttcaagcgctaccctgacaccttcaagatgccggtctacccgacccatcgcggcgccacggtgccggcggatgtgtttgcggccatcaagaagaacgcctctaacaccaacctggtgtccggcggcaacggtctggagaacttcgagaccgctatcccgttcccgatcccgaaaagcggcgttgaagtcatctggaaccacatcacccgctatcgcggcggcagcgtgactcgcctggtgacccaggccacgccgcaaaccaacggttcctacagcctggtgtacttccgcgatcagttcgtgttccgcgacaagatgaaggattacgacccgaaaaacccgggcaacgtgctgttctacttcaagcagcaagtgaccgcgccggcgcgtctggccggtggtgtgctgctggtgcacgaaaccctggaccaggtgaaggaaccgcgttcggcgtgggtctacaacgccggccagcgccgtgtgcgccgggccccgcaagtgtcttatgacgggccgggtaccgcagccgatggcttgcgtacatccgacaacctcgacatgtacaacggcgcaccggatcgctacgactggaagttggaaggcaagaaggaaatctacatcgcctccaacagctacaagctcgacgatccgaagctcaagtacgccgacatcatcaaggccggccacatcaaccaggacctggctcgctacgagctgcgccgtgtctggcatgtggtcgcgaccttgaaggaaggccagcgccacatctacgccaagcgtgacttcttcatcgatgaagacacctggcaagcggcagtgatcgaccactacgacggtcgtggccaactgtggcgcgtagcggaggcccatgccgagaactactacgacaagcaagtgccgtggtacgccctggagaccctctacgacctgcagtccggccgctacctggcgctgggcatgaagaacgaagagaagcaggcgtatgacttcggcttcaccgctaccaccagcgacttcaccccggcagccctgcgtcaggatggtgttcgctaagctgcacgcgtaactcaatgcgggagggggcaagcctcctcccacattttttgtcgcagttctttttcagtcatttgtagcaaagatctacaaacctgccgcttttaccgctagtctgcggacatctgcaatgccgaccacagccttctacaagagcccggcgatgactgatctgtcccgaatccaagggcctgccagtgcggtaatcccgaccctggaaggtcgcttctacagaccccccctgcctgacggctacgtgctgcgagcgcgcctgtgcgaacgcctgagcgccgggctggacgggcgcctgttgctggtcagcgcgccggccgggttcggcaagagttcgttggcggtggagttctgtcagagtctgccgaaccattggcacagcctgtggctgggcctgagtccacgggacaacgacccagggcgtttcctcgagcgcctgctcgacggtctgcagcaatttttcccccaactcggcgcccagtccctgggcctgctgaaaatgcgccagcgtcaccagccctttgcgtttgaggaatggctggatggcctgctcgacgagctggccgtgcacctgtccacccgtgcgccgctgttgctggtactggatgactatcacctggcccaggggccggtgcttgaccgctgcctgcagtttttccttaatcatctgcccgatggcctggtggtgctggtcaccagtcgtcagcgcccggactggcatctggcgcgcctgcgcctgtcgcgccacctgctggagttgaatgaacaggacctgcgcctgacgcacgacgaatcactggccctgctggatcgccacagcagttccctgcgcggtgaagcgctcgacaatctgatccgccgcagcgaaggctgggtcgccggcctgcgcttctggttgctggccgcctccgaggccggcagcgatggcggcttgccgcagaatctgcacggcggggaagggctgatccgcgattatctgcttgaagaagtgatcgactgtctgccggccgaagtacaggcgtttttgtacgatacagccccgcaggatcgtttttgcagcgaactctgtgatgccttgcgtgaagctcacgacagcgccgaaatcctgcgctacctgcaagcccatcaagtctttctggtgcctctggacgaacaggggcactggtaccgttatcaccacctgttttctgacctgctgcgcacccgacgcgccagtagccatgtactgccggccgccagcctgcacctgcgtgcgtgccgctggttcaatgcccagggcttgatcgatgaagcggtggagcaggcgttgcgtgccgggcacctggatgtggcggccaacctggtgcagaacctgtccgaagaacaactgctggccgagcagaatgtgggcatgttgctgcgctggaagatggacttgcccgatagcctgctgatcagcacgccgcgcttgatcgtgctgtacagctgggcgttgggcctggcttgccaattggacgcggcggaagagttatcaagctacctcagccgcttcctgccggcaccgtcggccaccgcgcaaaaatcgatgttggcgcagtggctggcactgagtgggatcatcgcccgaggcaggggggatcgtgagttgacccaacgctattgcagcgaagcgttggaaagcctgccgcaacggcgttacggccagcgcttgatgtgcctgtcgacgctctccaacctggccatcgtcgatgccgacctttggcgcgcccgtggtttgaatcgtgaatcccttgagctggcgcagcgggtaggcaacccgttattcgaggccctggcccattacgaccgtgcgcgggtgttgcaggcacgcggcgaaatcctgcgttccctggatgaggtgcgccagggcttgcagcgcctgcatggcctggcgccgcaacgcttgtacgcagtacgtgcgcggttatcgctctacgaaggtttcttgctgctggtgcgcctccagcctgaagccggcctcgctcgcttgcgcgccggcctcgccgaagcccgtgcttgccgcgatatcagcgtgttgatcggtcattgcgtgatcgccagtttcgaagggcgccggggtgacttcgccaaggccttcgccgaacttgccgaggcggagcgcctgatgcatatctgggacgtgccgccgatctactacctggcgatgatcaccctgatcaaatgcgagctgtggctggcccagggccgcaccgacctggccgacgcctggctgacccgcctggggcagacctacaacggcgaacacgctgcggccgcaccggagttccacccgcacctgccacagcatatcgggctgcaacaggctgcgctggatgccacgcgccaccaaccggctgcagcgctgcaacgccttgatgaactggcgcagcaggcgcatcacagtgggcgacagatgatcgccctcatggcgctgacccagcaggcgcagttgctgctggagagcggccaggaggccaaggcgtttccggtgctggcccaggcgctggaggcgggggtcggtggcgcgttgcaacctttccagcgtctgctggaaaaccacccggactggatgcgcgagcaactcgccaaagacccccatggcctcttgaacgagagcctgctggcgctgttgcccgccgccttggtggtggaggcggtgtcgactcaagaaaccttgagcgcacgggagctggccgtgctgcaactgatcgctcagggctgttccaaccaggagatcagcaatcggttgttcatctccctgcatacggtgaagacccatgccagccacatcaacagcaagctgggcgtcgagcggcgcacgcaggcggtggcgcgggcgcaggagctgaggttgattggctaggcctgggcttttgcgaaagccgcggccatggagtcttgttctcgctgcgaaagaccaaccgcttgagccacagtcctccaatggctgactgagttgatgcagtcagcgatgatttcatccgccttcccaaggttcacacggaagaaaccggcgacttctctcgccagttccagatccagcgcattgtcgtattcggtgatattgagtttcaggccgtctcccagtggcgtgggattcaagtcatacgcatccgaaaggcgccatccgttgcctggctccaggataaagccatgattgcgcaagtggtcgtcggtgtttgaaaccagaatattgaaaacgatgcgcgtccacagctcttgcagatcctggtcggtattcgagccgctgcgcatcagcacttcagctagctccaggtaacttgcgcctgagctggcgtcgtcaccatcgactcggcctgtgagcgtcatggcggatgcaaagtgcaggcggcccccagcagtcgtccggtcgaaacgtttgaccatgaagcaatgaaagtcgctggcatagcgcttgccgatcgccgaggcgacgttcaggccgcagcccttggccagggcgttgacgaccagctcccagccgcccacatcgtaggtgtcgcgggtcgagggaaacttggcgatccatagatggttatcgtggtcggcgacgctggctttcggacgtgcgccgcccagggaaccgccgggtgcaatcaacatgcgtagccattgccggccttctggggcctgattatccgggtcgttttccagctcgcgactggctctttccagcgcatgcagctcgacaaaaggcggcgcggcaatggcgtcctgatcatcgagaaaactgccggtatcgttcagccggtagcgtagggcgccggtgcggaagaggtcgtgtacgccaagcagatagtccgactcgccgagccgagtattcgcctcgtatagcccgtcgcggatgtcgcgttccaggcgtcgtttcatcaacaatcgcccccagcgatccgggcaggagtcgctgaagacaccaaacatgtttcgcccctcaacggggaactgagcgcctgcataggggccgatgcctggatcgatccgaacggcgctcagcacccggtcttgcaatgccagagggtcgctttcgtactcgaacttttcggtcatccgggtttttcttgcgtgcagccaaccaagacgccgggggccgtcgataccttcccagtcggcataaaccccaatcatggtcattacgtgtctgtcctttgccgtggtgggatcagtgcggccagtgcatcgctgctgagcgtgcccttgtcgggagggggcataggctttgaaggtagtggcttattgcgaacgatggcgttgtttcttgtaactttctctgacgccatcggcttattcgggcgcggggttgatgccttgcctgtcagcagtgttgcatcctgcagatgtcggcccagctcatcgtccgctgccacggtgttcaggtctttttcgaggcccagcacctgcaatatcgccaggtaagcgcccatggtactccccgaagaaccacgctccagtgcgcgaagtgtcatctgggacatgccggcgcgctcagctgcttgcttggcggtgatttttcggcgcaggcgcgcaagcttgatccgctcgccgaggtccgaaagcagacgctctgtagggggcagcaagggggcgatctttttagccatgctgttattcctgcactttttggcactaagtgaaagaataatagcatttatgttgttttctaaagtgcaattattctggcgataaagcgcgcgaagttatagtttaattgcattgaccaagattcagaggatcacccatgacgctcacggcttccacgctgattcgcgaaaccttccccgtaggccccttgcagtgcaactgcaccatcatcggcgatcccatcagcaaaaaggccatcgtggtcgacccgggtggcaaccatgagctgatcctggcgcggctcgatgctctgggcctgaaggtggtcagtattatccatacccatgcccatctcgatcatttcctggcgtccggccagttgaaggaaaagaccggcgccaccttgcacttgcacaaagaagatcaattcctttgggacaacctggaaatgcaatgccagatgtttcgcgtgccctataccccggtgccttcgccagatcgctggctggagcatgatgaagagttggcctgcggctgtggtgtggcgttgcacacaccgggacatacgccggggtcgatgagtttctggtttgccgatgccaagctgctgattgccggcgacacgctgtttcgccgcggtatcgggcgtacggatttgtggggtggagaccaggcgaccatcgtgcgttcgatcaagcagcggctgtacacgctggatgagggggcaacggtggtgaccggtcacggaccagatacccgattgggtgatgaaatgcgtgagaacccttttgtacgggcgtgacggaatgattgccgggttagaggcaagcgttgcagcaaaaactcaggtcgggttcagcgtgcgtctgctacggttgctgtagcgacggaatttttgccgtttgtcgtgttccaaactcggcacaggtccattgccaatgtcctttgcaccatagaatgcaaaagtaggagctcccttcatgttcacttcgcgtcgtctgcttgttgttgctaccgtcgtagccctgttgtccggctgcgcatcccctaacccttatgacggcagcagccaggggcaggcgagtaatgaatccggcggtatgagcaagaccgccaagtacggcggcctgggtgccctggccggtgcgctggcgggtgcagccatcgaccataacaaccgtggcaagggcgcactgatcggtgcggtcgttgcgggtgccggcgcagccggttacggctactacgccgaccagcaggaaaagaaactgcgtgaaagcatggccaataccggtgttgaagttcagcgccagggcgaccagatcaagctgatcatgccgggcaatatcactttcgccaccaactcggatgcgatctccagcagcttctaccagccgctgaacaacctggccaactcgctcaagcagttcaaccagaacacgatccagatcgttggttataccgacagcacgggcagccgccagttgaacatggacctgtcccagcgtcgtgcgcagagcgtggccaactacctgacgtcccagggcgtcaacggtgccaacctgagcgcacgcggtgccggcccggataacccgattgccagcaacgccgacgtcaacggccgcgcccagaaccgtcgtgtggaagtgaacctcggtccgatcccgggccagcagtacggccagccaggtgctcagcaacaggcgccacagcagaacaaccagttccagggcaacccgtactcgcagtaccagtaaacattcgctaataaaaaagggcgcctatgtaaggcgcccttttttgtagctgtcggttacatcagtcgatgtattcgaacaccttcacgatcttctgcacgccagacacaccctgcaccagattggctgcacgcgtggcttcggcctgggtcagcagacccatcaggtagacgataccgttgtcggtcacgaccttgatgcgcgaaccggggatcgcgttatcggtgagcatctgcgccttgatcttggtggtcagcagggcgtcattactgatggccagcagggtgattgggtccatcacctgcaattcgttatgcactttcttcacgcgctgtacggcagcggcggcttgctcggcctgggccttgaggtcggcgcgtggtgtctggccggcgagcaaaacaacgccgttgaagctggtcacgacgatgcgcgatgcaccgttgcccaggtcggtcgcggccttggcgacgttgacttcaaccttggtttcgatcagcgagtcgtcgattttgctgccgaaggtacgggtgcccttgtcatcctggataggggtgtcgcgtgttgcagtgatggccgtgctgcagccgctgatagcgaggcacagggtgatggccaaaaggctgaggcggttaacggtcattcttcactcccaaacagttggctgtcgatcagatcgcacaggcagtggatcgccagcaggtggacttcctggatacgtgcggtgacattggccgggacgcgaatctccacgtcttcaggcaacagcaatgaggccatgcccccgccatcgcgcccggtcaatgctacgacaatcatttcgcgatcatgtgcggcctggatcgcctgaataatattcgcagagttgccgctggtggaaatcgccagcagcacgtcacctggttggcccagggcgcgaatctgcttggagaagatttcgttatagctgtagtcgttggcaatcgaggtgatcgtcgacgaatcggtggtcaacgcaatggccggcaagctcgggcgctcacgctcgaagcggttgagcagctcggaagagaaatgctgggcatcgccggccgaaccaccgttgccgcacgaaagcattttgccctcgttgagcagggcgttgaccatgacctgactggcttgctcgatgtgcggtgcaagtacgtccatcgcctgttgcttggtgtcgatactggcctggaaaagctggcgaattcgggattgcatgtccatctgtgtgaccttaagtagcgcggctgtatggcacaggaatgtgcagcccgcaaagcaaagagcaaaagtgtgtggtgaagatgtccggcgaatcagctgtcgaaggcatttttgagccagttcagatcagcctgaccagacggtgtgctttctatggcaaccacatcgaaacggcagggggcgtcggcccagcgatgctctttttgcaggaagaactgcgcggcaagtatcagcttctgacgcttgcgcccgtcgatactggcgagcgcgccaccccattgtgcgtgttttctgtagcggacttcgacgaatactactgtatcgccgtcaagcatgaccagatcaagctcaccgcgtttacataaccagttctgcgccaataggcgcagaccttgtagttgcaagtacttcagggcttgcagttcggcgtccttgccgctttgtgcgctggaccgctcgggcatcagcgcggcgtgtccggcaggcgctggatctcgccaccgacaaacttggcccatggcatctggcgatcaacgcgctggttggcgctgatacccaggttgcccgacaggccgtcaacacgggtatccggcagtgccttgagttgccccaggcgcggcgccaggcggtaggcgtcgacgcccatcgcatacaggcgaccgaggctgccattggcttgtggccattgtgcagccacctggttgcgcagtgggtcggtggtgttgagcaaccaaggcgtttcgcagaacatcacgttggtcatgtccaggtactggttcttgtcgccgctggcactgaacacgtgggatgtggcgtacaccggcacgtcgccggcgtattggaagttcaaggtcggcttgatctgctgggccagttgcgggggcacggccaggaagatgaactcgatgtcctggcgacgcgacggctgcgcggctacgtcggtgccgacggtgctttgcaggctcttggcgcggccttcgcttttgcgcagctggaacagatcggcaatctgctgggcgagggcgacgggctgatcgacatattcaacccccatgacctggccgccattggcttcccagtcctggcggaaggctttgtagacacgctcaccccattcgccacgcggaaccatggcagcggcgcgatgcaggccgtcggcacgggcgcggcgcgacacttcgcgggcttcgtcttcagcggccaggccgaactggaacagttgcgccgggctgcgatcagtctcgctgtagttcaaagccagggtggtgatcggcaactgcgggcgggcactgagctgcttgaccagcggcttctccagcgggccgactaccagttgtacgccagcggcctgggccttggcgtagaagtcgtcgagggaggtcaggcgcgagctgtcatagaactcgatgaccggtggcttctgcccggcctgttcggcctggtagtgcgccgccatgaagccttcacgcagcgccttgccgacggaggccagcgggccgtcctgtggcagcagcagggcgatcttgttcaggggctggctggccagttccttgagcttggtcagtggtgtgggcagttgcacggcagccgggtggcccgggttctgtgcgcgccaggtgtcgatggcagcctgttgctgctccagcgtaccggcgcccttgaccgcttgggccagggtgatccaaccgtccaggaccggattgccgctggcttgcagctgttcggccggcacggcggcaatcagggcccagatggcttcgtggttgcttttggcggcatcacccgtgagcagtggggccatggcgacacgttcccgggcggcagccagggtctggccgtcggcctcataagcgcgggcgtgcacgctgccggtacggatctgctgttcaggcggcagctccttcaggctttgcaggctcggatggttcaaggcggtcagcgcagccttgggctggttgcgcgccatggccagttcggcggccagggtgctggcaaacacttgcgcggcgggcttgaggacatccaggggcacttgcgcaagaatctgcgacgagcgcccggggttgttctgcttgtaggccatgtctgccgcactcaggcgcagcaacgcggccttttctggcgtcttggcggtggtggcctgttcgagcagttgctcgatactggcgtccggggtccgtggaaggtcgccaaggctggacgagggcgagctggcgcacgcggccaacaaggcagcgaggcagagggcggagagcagccgcaggcaagcgatcatgtaagtgttcctgataccgatcaaattagcgtggaattgtacccaagcactggcccaggcgcgatgttactggcgtgaaaccatcgatttaggtcgtgcaaatgttgcagctggcgccaaacggctgaaaaggcatcggccgtggtggcatattttcaaggcgcctacgcgctacaatgtcgcttttgccaaccatcgaggtgtgcgttttgactgctccaggtcctttgaattccactgcaggctcgctttttgtcgtggcgacgcccattggcaacctggacgacatcagtgcccgggcactgaaagtgttgcgcgaggttaaattgatcgcggctgaagacacgcggcactcccagcgtttgatgcagcattttggtatcagcacgccattagccgcctgccacgaacacaacgagcgtgaagaaggcagccgttttatcgtgcgcctgttggccggcgacgatgtggcgctgatctccgacgcgggcacgccactgatctccgaccctggctaccatctggtgcgccaggcacgggccgctggtatcaatgtagtgcctgttccgggcgcgtgcgcgctgattgcggcattgtcggcggcgggcctgccgtcggatcgttttattttcgagggtttcctgccggccaaggccgtcgggcggcgcgcacgcctgcaagcgttaaaggaagaaccgcgcaccttgatcttctatgaggccccccatcgcatcctcgaatgcctgcaggacatggagctggtgtttggcggcgagcgcctggcactgctggcccgtgagctgaccaagaccttcgaaaccctcaagggcttgccgctggaagagttgcgtgcgtttgtcgaaggtgacagcaatcagcagcgcggcgagtgtgtggtgctggtggcaggctggaccgcgcctgaggacgaagatgcggtgggcagcgaagccatgcgcatccttgacctgctgctcaaggagatgcccctcaagcgtgcggccgccctggcggcggaaatcaccggggtgcgcaagaacctcttgtatcaagctgcgctggataaacagaaagccgaatagttccggggttgaaccggtattccgtctgaacgtgatggcaattctgaacttttattacttgtcctaagtccgccgtgccgttaacctgcgcggcggagagtcgattggacagtcgctgccctctatgaaaattaggggggggaggaaagtccgggctccatagggcgaagtgccaggtaatgcctgggaggcgtgagcctacggaaagtgccacagaaaataaccgcctaagcacttcggtgccggtaagggtgaaaaggtgcggtaagagcgcaccgcacgactggcaacagttcgtggctaggtaaaccccacttggagcaagaccaaatagggtcccaaggcgtggcccgcgctgggaccgggtaggttgctaaagatgtccagtgatggccatcgtagacgaatgactgttcaagacagaacccggcttatagatcgactctccacctttttccttctgtccgaatctcgagcagaaacccggtagtaacgcaagaatccctccctgccgaatcattggcagatgcatcttcgtaataccaaaaaaatcttactcttaataaattactttaagttcagcctatagctctttgagctatttgtgcttgttgggccaaaaacatcgccgaactctggtttctcctccctttacgctcctaaatctccgttctgtaaggcttttccttgaatccgcgccttgacggtgtggtgggcgcattcctatagtgtgcgcaagtggcggaaagtggcacaaagtgggttttttgaacgtaaaacgctaaaatttggagaaacgcatctgtgtttcgcggagctaacgctatcagtctcgatgcaaaaggccgtctcgccatgccgagccggtatcgtgacgagctcatttcgcgaagttccggacagttgatcatcaccatcgatgccgttgacccttgtttgtgtgtttacccgctcgatgagtgggagttgattgaaaccaaattgcgcgccctgccttcattgcgtgaagagaaccgccgcctgcagcgtttgctgattggtaacgccgtcgaccttgagctcgatggcagcggtcgtttcctggtgccgccgcgcttgcgcgaatacgccaagctcgacaagcgcgcaatgctggttggccaactgaacaagttccaattgtgggacgaagatgcctgggatgctgtttctgcagctgacctggctgctattcaacaaccgggcgccatgcctgatgaactgcgtgatttgatcctgtgactattgatagcggctttaaccacatcaccgtactgcttgacgaagccgttgaggctctcgccgtacgcgcggatggctgctatctggacggcacgttcggcaggggcgggcatagccggttgatactcagccagctcgggtccgacggcaaactcctcgggttcgacaaagacccccaagcgattgccaccgggcaagcgctagcggccgaagacggccgctttgtcgttgtgcagcgcagctttgccgagctgggtgccgaagtcgccgagcgcggcatggcgggcaaggtggccggggttttgctcgacctgggcgtgtcctcgccgcaactcgatgacccggagcgcggcttcagtttcatgaacgacggtccgctcgatatgcgcatggacccgacccgtggcgtcagcgccgcacagttcattgccaccgcgccggtggaagaaatcgcccgtgtgttcaaggaatacggtgaagaacgcttcgccggccgcatggcgcgtgccgtggtcgagcgccgcgaaatccagccgttcgagcgcactgccgacctggccgaagtgctgaaggtcgccaaccctgcgtgggaaaagggcaagaacccggcgacccgtgcgttccagggcctgcgtattcacgtcaataacgaattgggcgacctggaggccggcctcgaggctgccctcgaggcgctggaagtgggcggtcgcctggtggtgatcagcttccactccctggaagaccgtatcgtcaaactgttcatgcgtcgcctggtcaagggcgaatccgacaacctgccgcgcaatctgccggtacgtttcgaagcctttgtgccgaaaatcaaaatccatggcaaagcgcagttcgcctccgaagccgagctcaaggccaacccacgttcccgtagcgccgtcatgcgcgtcgcggagaagttgcggtgagcaagcttttcgccaagcccctcccgggcggcagcttctttatgttgctgctgtttgttggcgtgctgatatccgcgattgcggtgtcctacagcgcccactacaaccgccagttgctcaataccctgtacggggaattgagtgtgcgcgacaaagcgcaggcggaatggggccggttgatcctggaacaaagcacctggacagcccacagccgcatcgaagtgctggcgactgaacagttgaaaatgcacatcccgggcgcggccgaagtccgcatggtggcgccatgatgaaacttgaaggcgcactctacccctggcgcttccgcctgatgctcggcttgctggcattgatggtgggtgcgatcgcctggcggatcatcgacctgcaagtggtcgaccgtgacttcctgatcggccagggtgatgcccgtagcctgcgtcacatcccgattcctgcgcatcgcggcctgatcaccgaccgtaacggcgagccgctggctgtcagtacaccggtcaccaccctgtgggccaacgccaaggagttgcaggtcgccaaggatcgctggccggcgcttgccgccgcgctggggcaagacccgaaagccttggctgaacgcctggaagcccaggccaacaaagaattcatctacctggtgcgcggccttacccccgaacaaggccagcaggtgctcgaccttaaagtccccggtgtctacggcatcgaggaattccgtcgtttctacccggctggtgaaaccaccgcgcacatggtcggctttaccgacatcgacgaccacggccgtgagggtgtggaactcgcctacgatgaatggctcgctggggttcccggcaaacgacaagtcatcaaggatcggcgcggcagactgatcaaggatgtccaagtcaccaaaaacgccaaggccggtaagcccttggcgttgtcgattgacctgcgcctgcaatacctggccaaccgcgagttgcgtaacgcgatcatcgagaacggtgccaaggccggcagcctggtgatcatggacgtcaagaccggcgagatcctcgccatggtcaaccagccgacctacaaccccaacaaccgtcgcaacctgcagccggcgatgatgcgcaaccgcgccatgatcgacgtgttcgagccgggttcgaccatgaaagccatctccatgagtgccgccctcgaaaccggacgctggaaacccagcgacaaggtcgaggtgtatccgggtacgttgcagttgggcaaatacaccattcgtgacgtgtcccgtaccgaaggcccggtgctggatctgacaggtatcctgatcaactccagtaacgtgggcatgagtaaggtcgccttcgatatcggcggcgaaaccatttaccacctggcgcagaagatcggtttgggccaacccaccggcctggatttccccggcgagcgcgtgggcaacctgccgaactaccgcgactggaaaaaggccgagaccgccacgctttcctatggttacggcctgtcggtgacggcgatccaactggcccatgctttctctgtattggcaaataacggccgcatggttccgctgagccttatccatgtcgacgaagcgccgaaagccacccaggtgatcccggaaaacgtcgccaagaccatgcaaggcatgctgcaacaagtgatcgaagcgccacgcggtgtgttccgtgcccaggtgccggcgtatcacgtggctggcaagtcgggtactgcgcgtaagacgtcggtgggcaccaagggctacgccgaaaactcctaccgttcgctgttcgctggcttcggcccgatgagcgacccacgctacgccatcgtggtggtgatcgatgagccgagcaaagccggttacttcggtggcctggtctcggcgccggtgttcagcaaagtgatgtccggcaccctgcgcctgatgaacatcacgccggacaacctgccgccgactcaacaagcgaacgccggtccaccggccgccgctgtaaaagccaatggagggcgcggctgatgtctcttagcctgaacaagatttttgcccacgccggccgcgatctgctgatccgcgagttgagcctggacagccgcaatgtgcgcgccggtgacctgttcctggcggtgcctggcggcaaattcgatggccgtgcgcatatcgccgacgccctgcaacgcggcgcggctgccgtggcctacgaagtggaaggcgccaccgtgctgccgatcaccgatgttccgctgattccggtcaaggggttggccaaacagctctcggacatcgccgggcgtttctatggcgagccaagtcggcacgtcaacctggtcggcgttaccggcaccaacggcaagaccagcgtgacccaactggtcgcgcaggcccttgacctgctgggccagcactgcggcattgtcggtaccttgggcaccggtttctacggcgcgctgcaaagcggcctgcacaccacgccgaacccgattgccgtgcaggcgaccctggccgacctgaaaaaggccggcgcaaaggcggttgcgatggaagtgtcgtcccacggccttcaccagggccgcgttgctgcgctggcatttgatgtggcggtgatgaccaacctgtcccgcgatcacctcgactaccacggcaccatggaagcctacgctgccgagaaggccaagctgtttgcctggaatgacttgaagtgccgcgtagtgaacctggacgacgagttcggtcgccaactggccgccgaagaccgtgaatcgcgcctgatcagctacagcctggaagacgccagcgcgtacctgtattgccgcgatgcccaattcaatgacgaaggcgtgcgcgcgacgttggtgacgcctcagggcgaacatcatctgcgcagcaccttgctcggtcgtttcaacctgagcaacaccctggctgccgtcggcgcattgctcggcctggattacgctcttgacgaaatcctgcgtgtgctgcccaagctggaaggcccggtcggtcgcatgcagcgcctgggtggtggcaaacagccgttggtggtggtcgattacgcccacaccccggacgccctggaaaaagtcctggtggccctgcgtccccacgccaagggcaagttgctgtgcctgtttggttgtggtggtgatcgtgatcgcggcaagcgcccgttgatggccgagattgtcgagcgcctggccgatggcgtgctcgtcaccgacgacaacccacgcagcgaagacccgagccagattttcgacgacatccgcgtcggcttcaaagatgtgtccaaggctacgtttgtagccggtcgtggcgcggccatcgcccaactgatcgccagcgccagtgctgatgacgtggtggtgctggccggtaaaggtcacgaggactatcaggaaatcaacggcgaacgccatgccttctccgatctggtcgaggccgatcacgccttgaccgcctgggaggttgcccatgcttaaaccgatgacattcagcgaactgacccaggccctgtcggcccgtgtactgtccagcgattgccgcttcgacggcgtgagtatcgacagccgcaacatcaagccggggcaactgtttgttgccctggctggcccacgtttcgacggtcacgactacctgaatgaagtcgccgccaaaggtgccgtgggtgccttggtgcagcgcgaagtcgcggattccacgctaccgcagctgctggtcgccgatacccgcctggcccttggccaattgggtgcgttgaaccgtgccgcgttcaccaaccccgttgcggccatcacgggctccagcggcaagaccacggtcaaggagctgctcgctggtgtgttgcgcacgcgcggcccggtgctcgccacccgtggcaacctgaataatgattttggcgcaccgctgaccctgctcgaactggcaccggaacacaccgcggcggtgatcgagctgggcgcgtcgcgcatcggcgaaattgcctacaccgtggcgctgaccaagccccacgtggcgatcatcaacaatgccggaaccgcccacgtcggtgagttcggtggcccggaaaaaatcgttgaagccaagggtgaaatcctggaaggcctcgatgcatcgggcaccgctgtactgaatcttgacgacaaggccttcgaaacctggcgtgttcgcgcagccggtcgcaaggtcctgacgtttgccgtgcgcaacgctgcggctgattttcatgcgtccgacattaccgtcgacgcccgtggttgcccttcctttaccttgcacaccccgcagggcaatgagcacgtgcagttgaacctgctgggcaaccataacgttgccaatgccctggccgccgccgctgccgcctacgccctgggcgtgtcgctgttcggcatcgccaccgggcttggcgcggtgcagccggtcaagggtcgtaccgtggcgcagctggcaaccaatggcatgcgcgtgatcgatgacacttacaacgccaaccagtcctcggtctgcgccgccatcgacctgcttaaaggcttcgacggccgcaaggtactggtgctgggcgacatcgccgagctgggcgactgggctgaacagtcccaccgtgaggtcggtgcctacgctaccggcaacgtcgacgcgctgtacgccgtcggcccgaacatggcccatgccgtcaatgcgttcggccccggtgcacgtcatttcgcgacccaggccgagctgatccaggcgctgacgacggctgaacacgacaaacatacaaccattttgatcaagggatcgcgcagcgcggtgatggaaaacgtcgtcgcggccttgtgtggctcaagtacggagaaacattaatgctgctgctgctggctgagtatctgcaacagttccacaaaggcttcgcggtctttcagtacctgaccctgcgcgggattctgggtgtgctgaccgcgttgtgtttgtcgctgttcctggggccgtggatgatccgcaccctgcagaacctgcaaattggtcaatcggttcgtaatgacggcccgcagtcgcacctgtccaagtccggcaccccgaccatgggcggtgcgctgattctgtcgtccatcggcgtaagcactttgctgtgggccgacctgcacaaccgctacgtgtggactgtgttgttggtgacgttgctgttcggcgccatcggttgggtggatgactaccgcaaagtgatcgagaagaactccaagggcctgccaagccgctggaagtatttctggcagtcggtgtttggcctcgccgcggcgatcttcctctacaccactgcgcccagcgcagtggaaacgaccctgatcatcccgatgctcaaggacgccagcattcccctgggcattggcttcgtggtgctgacctacttcgtgatagtcggttccagcaacgcggtcaacctcaccgacggcctcgacggcctggcgatcatgccgacggtgatggtgggcggcgcgctcggcatcttctgctacctgtcgggtaacgtgaagttcgccgaatacttgctgatcccttacgtaccgggcgcgggtgaattgattgtgttctgcggcgcgctgatcggtgccggcctgggcttcctgtggttcaacacgtacccagcgcaagtgttcatgggcgatgtcggcgcactggcgctgggcgcggcccttggcaccatcgcggtgatcgttcgccaggaaatcgtgctgttcatcatgggcggtgtgttcgtgatggaaaccctgtcggtggtcatccaggtggcgtccttcaaattgaccgggcgtcgagtgttccgcatggcgccgattcaccaccactttgaactcaagggctggcccgagccacgcgtgattgtccgcttctggatcatcaccgtgattctggtgctgattggccttgccaccctgaaactgaggtagaaacgagtgtccctgatcgcttcagaccacttccgcattgttgtcggcctcggcaagagcggcatgtccctggttcgcttcctggcgaaccggggcacgtcgtttgccgtggccgatacgcgggaaaatccaccggagctggtcacgctgcgccgtgactacccgcacgtggaagtgcgttgtggcgagctggatgtcgagtttctgtgccgtgccgacgagctctacgtgagccccggcctggccctggcgactccggccctgcaagccgccgctgcgcgtggcgttaagctgtccggcgatatcgacctgtttgcgcgtaacgcgaaggcgccgatcgtggccatcagcggttccaacgcgaaaagcaccgtgaccaccctggtcggcgagatggcggctgcggccggcaaacgcgtggccgtgggcggcaacctcggcacaccggcgctggacctgctcagcgatgacgtcgagctgtacgtcatggagttgtcgagcttccaactggaaaccacccacgacctcggtgccgaagtggccaccgtgttgaacgtgagcgaggaccacatggatcgctacagcggcctgccggcgtatcacctggccaagcaccggatcttccgtggcgcacggcaagtcgtggtcaaccgccaggatgccctgagccgtccgctgatgggcgagggcctgccttgctggaccttcggcctcggcaaacccgatttcaaagccttcggcatccgcgaagagaacggcgaaaaatacctggccttcgaattccagaacctgatgccggtgcgcgagctgaaaattcgtggcgcccataaccagtccaatgccctggcggccttggcactggggcatgccgtcggcctgccgtttgacgccatgctctcggcgctgcgcagctttggcggtcttgaacatcgctgccagtgggtgcgcgaccttgatggcgtcagctattacaacgattccaaggccaccaacgtcggtgcagccctggcagccatcgaaggccttggcgccgatatcgacggcaagctggtgctgatcgccggtggcgacggcaagggtgccgacttcaaggaccttaaaggcccggtggctgaacattgccgcgccgtggtgctgatgggccgtgattccgatctgattgccgccgccctcggtgacgctgtaccgcaagtgcgagctacgtccctggacgacgccatcgcccgttgcaaggccctggctcggcccggcgatgcggtgctgctgtcgccagcctgcgccagtttcgacatgttcaagaactacgaagagcgcggccagctgttcgcccgcgccgtggaggccttggcatgaatttccggaatatcatcaagccgtatccgtcgccgatcatcaccgggcgcggtatcgacctcgatttcccgatgctcgccggttgcctcgccttgttgggcctgggcctggtgatgattacctcggcgtcgtccgaagtggctgccgtgcagtcgggcaacaccctgtacatgatgatccgtcacctggtgtacctggtgatcggcctcggcgcgtgcatcgttaccatgatgatccccatcgccacctggcaacgcctgggctggctgatgctgatcggggcgttcggcttgctgatcatggtgatcctgcccggcatcggccgcgaggtgaacggttcgatgcgctggatcggctttggcgcgttcaacgtgcagccgtcggaaatcgccaaggtattcgtggtgatctacctggccggctacctggtacgccgccagaaagaagtgcgcgagagctggatgggtttcttcaagccgttcatcgtgctgctgcccatggctggcctgctgctgatggagcccgacttcggtgccaccgtcgtgatgatgggcgctgctgcggcgatgctgttccttggcggcgtgggactgttccgcttcaccttgatggtggtgctggccgtggcggcagtgaccgtcctggtgcaggcacaaccctaccggatggcgcgtctgatcacctttaccgatccctgggccgaccagttcggttccggctaccagttgacccaggcgctgatcgcctttggtcgcggcgagtggctgggcgtgggcctgggcaacagtgtgcagaagcagttctatctgccggaagcgcacaccgacttcgtgttctcggtactggccgaagagctcggtgtggtgggttcgctatgcaccgtcgcgctgttcgtgttcgtgtgtgtacgcggcatgtacatcggcctgtgggccgagaaggccaaacagtattttgccgcctatgtggcgtacggcttgtcgttcctgtggatcggccagttcctgatcaatatcggtgtgaacgtcggcctgttgccgaccaagggcctgaccttgccgtttctcagttacggcggcagttcgttggtgatctgctgcgcgtgcctgggcttgttgctgcgcatcgagtgggagagtcgaacccatttgggcagcgaagagatggaattcagcgagagcgatttcgccgaggagccgacccatgggcgctaacgtgctgatcatggcgggcggtaccgggggccacgtgttcccggccctggcctgcgcgcgcgaattccagaaccgtggctacaccgtgcactggttgggtacgccgcgcggtatcgaaaacgagctggtgccgaacgccggtttgccgctgcacctgatcaacgtcaccggtctgcgcggcaagggcaagttgtccctgctcaaggcgccgttcgtgttgctcaaggcggtgtggcaggcgcgcaagatcattcgtgaactgaagccggtgtgtgtgctcggttttggtggctatgtgaccggcccgggtggcgtcgccgccaagctcgccggtgtgccggtgatcgtgcacgaacagaatgccgtcgccggcaccgccaaccgcctgctggtgcctctggcggcgcgggtgtgcgaggcctttccgaagacctttggtgcatcggacaagctgcgcaccaccggcaacccggtgcgtaccgaactgttcatgggcatcgcccgtgaagcattggccgggcgcaaggcgcacctgctggtcatgggcggcagcctgggctccgagcctttgaacaaactgctgccggaagccctggcacaactgcctgtggagctgcgtccagagatcttccaccaggccggcaaaaaccacggtgaagtcaccgccacgcgctatcgcgaggccggtgtggaggcgaacgtacagcccttcatcaaagacatggcccatgcctatggctgggccgacctggtggtctgccgctccggtgcgctgaccgtcagtgaactggccgccgccggtctgccgtccttgctggtgcctttgccccatgcgatcgacgatcaccagacccgcaacgctgaatatttggccggggagggcgctgccttcctgctgccgcaaagaacgactggcgccgccgacttggccgcacgcctgaccgaggtattgatgcaaccggaacgactcaacagcatggcgagtactgcaagccgcctggccaaacctgacgcaacccgcaccgtggtcgatatctgcctggaggtggcccatggttgagaatcagaaagccatgccacagccggaaatgcgccgtatccgtcgcatccacttcgtcggtatcggcggcgtgggcatgtgcggcattgctgaagtattgctgaacctgggctaccaggtgtccggctccgacttgaaagagtcgccggtcaccgaccgcctgaagtcgttcggcgcgcagatctttatcggccaccgtgccgagaacgccgccgaggccgacgtgctggtggtgtccagcgccgtgaacacctccaacccggaagtggccaccgcccttgagcgccgcattcccgtggtgcctcgcgccgagatgctggccgagctgatgcgctatcgccacggcatcgccgtcgccggtacccacggcaaaaccaccaccaccagcctgatcgcctcggtgttcgccgccggcggcctggacccgacgttcgtcatcggtggccgcctgaatgcagccggcaccaatgcccagctcggcaccagccgctacctgatcgccgaagccgatgaaagcgatgcgagcttcctgcacctgcagccgctggtggccgtggtcaccaacatcgacgccgaccacatggcgacctacgacggtgacttcaacaagttgaagaaaaccttcgtcgaattcctgcacaacctgccgttctacggtttggcggtggtgtgcctggacgatccggtggtgcgcgaaatcctgccgctggtcaagcgtccgaccgttacctacggcttcagcgaagacgccgacgtgcgcgccatcaatgtgcgccaggaaggcatgcaaaccttcttcaccgtactgcgtccggaccgtgaaccgttggatgtctcggtgaacatgccgggcaaccacaacgtactcaattctttggcgaccatctgcatcgctaccgacgagggcgtcagcgatgaagccatcgtcgaaggcctgtcgcgctttgccggcgtgggccgtcgcttccaggtctacggccaactgccggtagagggcggcgacgtgatgctggtggacgactacgggcaccacccgactgaagttgccgcggtgatcaaggccgtgcgcggtggctggccggagcgccgcctggtgatggtgtaccagccgcaccgctacagccgtacccgcgacctgtacgacgatttcgtcaatgtactggccgatgccaacgtgctgctgttgatggaagtctaccccgccggtgaggagcctatcccgggggccgacagccgcaagctgtgcaacagcatccgtcagcgcggccagttggacccgatctacatcgagcgtggcgtggacctggcgccaatcgtcaagccgctgctgcgggccggcgacatcctgctgtgccagggcgccggtgacattggtggccttgcgccgaaattgctggcgagcccgctgtttgcggcaaaaaagggagcggcgaaatgatcactgactacgcctccctgttttccacgatcacgcctgccgacttcggtcgcgtagccgtattgttcggcggcaagagcgccgagcgcgaagtctcgctcaagtccggcaacgccgtgctcgaagcactgcaaagtgcgggcgtgaacgcgttcggcatcgacgtgggtgatgacttcctcgcccgcctgcaggccgagaagatcgaccgcgctttcatcatcctccacggccgtggcggtgaagacggcagcatgcaagggctgctggagtgtgccggcattccttataccggcagcggcatcctggcttcggcgctggcaatggacaagttgcgcaccaagcaggtgtggcacagcctgggcattccgaccccgcgtcacagcgtgctgtgcagcgaagacgattgtatttctgcagccaaggaactgggcctgcctttgatcgtcaaacctgcccatgaaggctccagtatcggcatggccaaagtgaactcggccgccgaattgatcgacgcatggaaagcggcaagtacctacgattcgcaagtgttggtggaacagtggatccagggtcccgagtacaccatcgccaccctgcgtggccaggtattgccgcctatcgcattgggcacgccccacaccttttacgactacgacgccaagtacctggcttccgatacccagtaccggatcccgtgcggcctcgacgcagccaaggaacaggaattgatggacctcacggcgaaagcctgtgaggcgctgggtatcgccggttgggcgcgggcagacgtgatgcaggatgaccaagggaatttctggttcctggaagtcaacactgcaccgggcatgaccgaccacagcctggtacctatggccgctcgcgctgcgggcctggacttccagcaactggtgctggcgatcctggctgcaagcattgagccacgaggctaaggacatgaaaggcgcatcgcttcgtcatcagcccccacaagcaccgagccgcaagccggtgccacggggtgccagccgaatggtggctaaagagccgatgtcggcgcgcctgccgaaagccaactttggtttcctcaaggcgttgtactggccggtgttgctggtggtcttgggcttcggaacctacgagggcgcgcagcgtctgttgccgtatgccgaccggccgatcaccaagatcagcgtgcagggcgacttgagctacatcagccagcaagcggtacagcagcgcatcggcccgtacctggcggcgagcttctttaccatcgacctggccggcatgcgctcggagctggaacagatgccgtggatcgcccacgccgaagtccgccgcgtatggccggaccaggtgacgatccgcctggaagagcaactgcccgtggcccgttggggtgacgaagcgctgttgaacaaccagggccaggcgttcaccccgcgtgagctggccaactacgagcacctgccgcagctcttcgggccgcagcgggcgcagcagcaagtgatgcagcagtaccaggccttgagccagatgctgcggccactgggcttctccattgcacgcctggaactgcgtgaacggggcagctggtttttgacgaccggggcaggcagttccggcccgggcatccagttgttgctgggacgcgaccgcttggtggaaaagatgcgccgcttcattgccatctatgacaagaccttgaaagaacagattacgaacattgcgagcgtcgacctgcgttacgccaacggccttgccgtcggctggcgtgaaccggctgcgcccacggcagcgcaacccgctgtcgcgaagaattaagaagaggcaggacccatggcaaacgtgcaaagcggcaaaatgatcgtcggtctcgatatcggcacctccaaggtggtggcgctggtgggcgaggtcggggaagacggcacgatcgaaatcgtcggtattggcacgcatccgtcccggggcctgaagaagggcgtggtggtgaacatcgagtccaccgtgcaatcgatccagcgcgccatcgaagaagcgcagctgatggccggttgccggatccactcggcgttcgtcggcgtggcgggtaaccatatccgcagcctgaactcccacggcatcgtggcgatccgcgaccgcgaagtcagctcggccgacctcgagcgcgtgctcgacgctgcccaggctgtggcgatcccggctgaccagcgcgtgctgcacaccctgccgcaggactacgtgatcgacaaccaggaaggcgtgcgcgagcccctgggcatgtcgggcgtgcgcctggaagccaaggtccacgtggtgacctgcgccgtcaacgccgcacagaacattgaaaaatgcgtgcgccgctgcggcctggaaatcgacgacatcattctcgagcagttggcctcggcctactcggtactgaccgacgacgagaaagagctgggcgtgtgcctggtggatatcggcggcggcaccaccgacatcgcgatcttcaccgagggtgcgatccgtcacaccgccgtgatcccgattgcgggtgaccaggtgaccaacgacatcgccatggcgttgcgcacaccgacccagtacgccgaagaaatcaagatccgctacgcctgcgccctggccaagctggccggtgccggcgagaccatcaaggtgccgagcgtgggcgatcgtccaccgcgcgaactgtcgcgccaggccctggccgaagtggtcgagccacgctacgacgaactgttcaccctgatccaggctgaactgcgccgcagcggctacgaagatttgatcccggccggcatcgtgctgaccggtggtacctcgaaaatggaaggcgcggtcgagctggccgaggagatcttccacatgccggtccgtctgggcgtgccccatggcgtcaaaggcctgggtgacgtggtacgcaacccgatttattccaccggtgtgggcttgctgttgtacgggctgcaaaagcagaccgacggcatttccctgtcgggcccgagcaaccgtgacagctaccgcagcgacgacgaggccaaggcgccgttgttcgagcggttgcaggcatgggtcaaaggcaacttctaacgatttaccgcgacaccgcaacaccgttgtaagcagtaggcgaaaaaactagagaaatgaaaggagagggaacatgttcgaactcgtagacaacatccccgcaagcccggtcatcaaagtgatcggtgtcggcggtggcggcggcaacgctgtcaaccatatggtcaagagcaacattgaaggcgttgaattcatctgcgccaacactgatgcccaggcgctgaaaagcatcggcgcgcggaccatcctgcaattgggcactgcggtaaccaagggccttggcgctggcgccaacccggaagtcggccgtcaagccgcgctggaagaccgcgagcgtatcgctgaagtgctgcaaggcaccaacatggtgttcatcaccaccggcatgggcggcggtactggtaccggtgctgcgccgatcattgccgaagtggccaaggaaatgggcattctgacggttgctgtcgtgacccgtccgttcccgttcgaaggtcgcaagcgcatgcagatcgccgacgaaggcatccgtctgctgtctgaaagcgtcgactcgttgatcaccatccccaacgagaagctgctgaccatcctgggcaaggacgcaagcctgctgtccgctttcgccaaggctgacgatgtactggccggtgccgttcgcggtatctccgacatcatcaagcgcccaggcatgatcaacgtcgactttgccgacgtccgtaccgtgatgagcgaaatgggcatggcgatgatgggcactggctgcgccagcggtccgaaccgtgcacgtgaagccactgaagcggccatccgcaacccgttgctggaagacgtgaacctgcaaggcgcacgcggcatcctggtgaacatcaccgccggtcctgacctgtccctgggtgagtactccgacgtgggtagcatcatcgaagccttcgcttccgagcacgccatggtcaaggtcggtaccgttatcgatccggacatgcgcgacgagctgcacgtgaccgtggttgcgaccggcctgggcgcgaaaatcgagaagcctgtgaaggtcatcgacaacaccctgcacaacagccaaaccagccacgccagccaagcggctgccgctccagcgccttcgcgccaggaactgccgtcggtgaactaccgtgatctggaccgtccgaccgtgatgcgcaaccaggctcaggccggtgctgcggcgtcccgtagcccgaatccgcaagatgacctggactacctggacatcccggcattcctgcgtcgtcaggccgattaatggaatgtatcagggctatgaaggtgattggtgttcagcaaaggtctggtctgctattatcgccagcctttgttgataccagttcgcaatttgcgctgaagcggtccaagccatgattaaacaacgcaccctgaagaatattattcgtgccacaggtgtaggtctgcactccggggagaaggtatacctgaccctcaagcctgcacctgtcgacaccggcatcgtgtttgtgcgtgccgacctggaccctgtggtgcagattcctgctcgcgcggaaaacgttggcgaaaccaccatgtcgaccacattggtcaacggtgacgtcaaagtggacacggtggagcacttgctctcggccatggctggcctgggcatcgataacgcctacgtcgagctctccgcgtccgaagtcccgatcatggatggcagcgctggacccttcgtattcttgattcaatctgccggcctggaagaacaggacgcagctaagaagttcattcgcattctgcgggaagtgacagtagaagacggcgacaagcgcgccaccttcgtcccgttcgaaggctttaaagtgagctttgagatcgatttcgatcacccggtattccgtgaccgcacccaaagtgcaagcgtggatttttccagtacttcgttcgtaaaagaagtcagccgcgcccgtacctttggtttcatgagtgacatcgagtacctgcgcaagcacaacctcgcactcggcggcagcgttgaaaacgccattgtggtcgacgcggatggtgtactgaacgaagacggccttcgctacgaagacgaattcgtgaagcacaagatcctcgatgccatcggtgacctctacctgctgggcaatagcctgataggcgagttcaaaggcttcaagtcgggccacgcccttaacaaccagctgctgcgcaagttgattgagcagacagacgcttgggaagtcgtgaccttcgaagatgccagcaccgcaccgatctcttacatgcgtcccgttgcggcggtgtaagtaacaactctctttctttagttttgaaaggctgccttcgggtggcctttttttatgcgcactttttctgactctgcctcggttcaggggtgggagggggcttgcccccgattgcagcgggtcaggccaggcatttgtcactgatgcaccgccatcgggggcaagccccctcccacattaggtcgggtttattatttagagggttgcggaatcgacaatgcggtttcttccgctgtgcttggcctcatacagcgcctggtccgcactcagcagcaacgcctccagcgactggcgactgcgcttgtcccacgtactcatgccaatactcaccgtaatcggctgctcatcaccctccactcgcggcaagtgctcgacaccgctgcggatatgctcggcgatcaccgaggcacccttggcgtcggtcaccggcagcaccactgcaaactcttcaccgccatagcgtgccgccaagtcggccgggcggcggatgttggtaccgatcacttgggccacgttacgtagtgcctcatcaccgccatgatgaccatgacggtcgttgaacgccttgaagtggtccacatcgatcatcagcaccgtgagcggctcggtcgagcgttgggcgcggtcccactccaggcgcaggcgttcgtccagcacgcggcggttggccaggcccgtcaacgcatcggtggctgccagttctgacagtacccgttcagcgcgccgccgccgtcgcagttcccggcgtagcatccaggtcagccacaacaaaccggcacagagcactccggttgcactactggtcagcagtgccacgcgactccagggcgcgaatacgtcctcgctggacagcgccacgaccacgatcagcggcagttcaccgacattggtaaaggtatacaggcgttctttgccactgatggcagagatcgcctgaaagctgccgcttccgtcacgcagtattcgcttgaagttgggtcggtcactgaggtccttgtcgatcatgtcgcgttcgagcagcggctgctgggccaggagaatgccattcctgctcagcaggttgacgctgctgccgttgccgatggtcagggtgttgaagagctgatcgaaatacgccaggcgcatggtcgcaaccgccacgccggcaaactctcccttggggcccgacacacgtcgactgaatgccatgcgccagacctggtcgcagtcgcaacggaccttgaacggccgactgataaacaagccggcgttggcgtccttggcatgcacctggaaataatcgcggctggcaaaattacgcggcgtgggccgcagcgtggaggagtcggcgataaccgtaccggtggtgtccagcagcaggacctcgcctttgaaaggcgccgccgtggacaaatcaaactgcaccaggtgctggatattggcggcaacctgggacaggtcttcgcgttgcgtggccgcaatcagaccgttgagcgccatgtcatacagttcgacgttacgcagcacgtcggcattgatcaattgggcgatgttggtggtagaccgcttggccgcttcgagcgtgctggcgtgttcgcgcatcaacagcaccgcgacaatgatcacaatcagggcgacgctgagcccgctgcccaggatcagtaacaactcagggtgtgcgggtgaggtacgaacagggcgtggactcatcgggcagacttcagcggtgaggatgctggcagtttagttctaccagatgaaaattaaatacttggttaaaaagaaaaaatcacccctcagaacacgttgatcggatagtcgacgatcacgcggtactcgtccacatcccgatccaccgccgcgtagccattgccaccgcggttggtcgcccattgcaggcgcaccgccaggtccttggccttgccgccctgcaccacgtatttcacgtcgatgtcgcgttcccagtgcttggcatctttgccatcggcgctgtaccaggcgctgtagccacggctttgcggatcaaccttggtcaggtcggtcttgccgctgatgtaggacaccgccgaggtcaggcctggcatgccgaggccgacgaagtcataggcgtacttgagcttccatgagcgttcgttggggccgttgaagtcggagtactgctgggagttgtccaggtagacgctgtcaccttgggcgatgtagtcgaacggcgtgttgccgttgacccgctggtaggtggcggtgacgctgtggttgcccacgcccacggtgaaatgcaggctgtaggtgttgttgtcgatgctgccgagcagcgactggccggtgtcctgggtgtggtagtagtgcaggcccgggttgaggctgaccaggtcattcagcgcataggtgtagtccaggtcgtagtagtactggttccacacatccttgagttcggcggcgtaaaggttgctggtcagcccgtcgatgccgctgaacgacacgccggcccagttcatgtgctggctgtcggcagtgttgggcagcgcgccgtagctggtgccgatgcggcgatggccgctctggttgtagagcttggtgaaactggcctggccgccttcgaacacccagccgtcgaggctgaggttggtcaggctcacgccacggaaggtctgcggcagcatgcgtgtcgcgccgccggcgatcaccgggttattgaggaacagatcgccggctttcagctcggtatcgaacgcgcgcattttcaaggtgccgcctgccgtggagaacgagccgggtgccttgccgttgccactgccatacggaaggatgctggaaccatcggtgccgccaccgccgtcgagcttgaggccgagcatggcatgggcatccaggccgaagccgacggtgccctgggtgtagccggattcgaagatgccgatgaaaccctggccccactctttgctgtcatcggtgtggatgtcgcgccggtcgcggttcatgtagtagttgcgggtgttgatgttgaggtgggcgccttcgacgaaaccgtcggcgggggtggtgtctgccgcgtgggcaagggaggtaatcgttgcggctactgcgaggaataacggggtgaacgtcagcgagttcttcaccggtggagctcctttggtcaatcggaaacagccagtgtcgttgggggtgcctggccttttttgacggcaaaaaaaagccgctgaaggtcagcggctttaagacagattcccagtgtagagccctggaaataagtcgagggaaattcgggtaagcgggaaagctgtctttgccgtcgcgctcatcgatgcgtcaaattaacgcaggcgagcggtgcggtacagagtgtaacaagataatgactgttgcccaaatcgcaacagtgatggtgtgaagggcaatgtgggagggggcttgcccccgatggcagtgtgtcagccagttcatgggtaactgacgctccgctatcgggggcaagccccctcccacaggttggctgccgtgttctcaggagattcagaggggcagggtaataccgaaggtattgccaccgccgtcgctgcgtacgaacacatccccgccatgcatcaacgcaatcgccttgacgatcgccagccccagcccgtgattcgcaccgctgttgctgcgcgacgcgtctacccgatagaagcgttcgaacaggcgcggcaggtgctcgctggcaatcgcatcgccggggttggtcacaccgatagagacctgatgcgcctgcacctcgatgttcacggcgatgacctggccgggcgcggtgtgctgcaccgcattgctcagcaggttgatcagcgcgcggcgcaggtgggccttctcgatctgcaccagggcgtcaccgtggacctgcacctggacctgggcgtcttcgaggatgaagtccaggtagtccagggtcgtggccacttcgtcggccagggagctttcgatcagcttggtggctttgctgccctggtcggcgctggcgaggaacagcatgtcgttgatgatcgaacgcaggcgctccagctcttcgaggttcgattgcagtacctcgaaataatgctcggccgagcgccctcgggtcagcgccacctgggtctggccgatcaggttggtcagcggcgagcgcagttcatgggccacatcggcgttgaacgactccaggcgcgaataggcttgctcgacgcggtcgagggtggagttgaacgaattgacgaactggctcaactcggggggcaacggcgacagctgcaggcgcccggagagcttcggcggcgcgagtttctgcgcttcgtccgagagtttgcccagcggtttgaggccgatgcgcgccacccagaaccccagcaacgatgccagcaccacgcctaccagagccaggctgatcaacgccaccagcaggtgatgctgggtggcgcggaagttctcggtgtcgatggcgatcatgaagcgcagcggcgggcgttgatccttggccgggaactggctcaccagtaccttgaacgggtgtttgtcgccggccaggcgcaagtcgcgcttacctgtgcgtccttcggcgaaggcgcggatctgcgcatctgggttgccgtactcgtagttcgggtcgctgctcacgacccagaagcggatgcgtttgtcttcctcgctcagcaacttgagcttggcctgtatctttacccaatggtccggtgtaccgaagcgattcaccgacgattcgagcacgctgtagcgcgcctccagttcggcgcccggcagcaggccaaggctgcggtccacctgttgatagagcgcgccgccaatcaacaggaagatcagtgccgccaccagggtgaacatgctgctcaggcgcaaggcaatcgagttagccgacactgcgactctccaacacatagcccatgccgcggatagtgtgcagcagcttggtgtcgaacggcccgtcgagcttggcgcgcaggcgcttgatcgcgacttccaccacattggcatcgctgtcgaaattgatgtcccagaccatttctgcaatcgctgtcttggagaggatttcgccctggcgccgtgccaatacgctgagcagcgagaactccttcgcagtcaggtccagacgctggccgttgcggctggccttgcggctgatcaggtcgatccacaggtcggcgaccgtgacttgcaccggctcgtgcccgccactgcggcgggtcagggcttgcaggcgcgccaccagttccaggaacgaaaacggcttgcccaggtaatcgtcggcgccttcgcgcaggccgcgaatacggtcttccacgcgctcacgggcggtcaacatgatcaccggtgtctgcttgcgcgcacgcagcgcacgcaacacgccgaagccgtcgaggccgggcagcatcacgtcgagcacgatcaccgcgtagtcgttctccagcgccaggtgcaggccttcgacaccttcgcgggcgacatcgaccgtatagccttgctcggtcagaccgcgatgcaggtagtccgcggttttttcttcatcttcaataatcaggacacgcatgagtcttttgctccagggccgggcctcagtgtgtgctcgccagcgcaggcgttggtttgggccggtggaaaaacttctcgaggtacaagtatatgaccggtgtggtgaacagcgtcagcgcctggctcaccagcaagccgccgaccaccgcgatccccagcggctggcgcatctccgcaccggggccggcgccaagcatcagcggcaccgcgccgagcagggcggcgagggtggtcatgatgatcggccggaaccgtgtaacgcaggcttcatagatcgcatcttccggcgacaggcccctgacacgctgagcctccagggcaaagtcgatcatcaggatgccgttcttcttcacgatgccgatcaacagcaccaggccgatcaaggccatgatcgaaaagtcctggcccatcagtgacagcatgatcagcgcgcccaaccccgctgacggcaaggtggagatgatcgtcaacgggtgcacgaaactctcgtacagcacgccgagaataatgtagaccgccaccagtgccgccaggatcagccacggctggctggccaacgaactctggaatgcctgggccgcaccctggaagttaccgatgatggtggtcggcatgccgatttcattcttggcctggttgagcatgatcactgcatcgcccaaggccacccccggcgccaggttgaatgacaggttggcggccgggaacatgccgtcgtggctgatcgaaagcggccccactgtgggcgggtcaaccttggccagcgccgacagcggcaccatctcattggtcagcggcgagcgcaggtaaaagtagttgaggctttcggccttgccgcgttgctgggtgtccagttccagcaccacttggtactggttgatctcggtctggaactcgttgatctggcgttggccgaaagcatcgtacagcgcctgatccacatcggtggcggtcaggccgaagcgtccggcggcctggcggtcgatgctgatgtgggtgatgctgccgcccagttgcaggtcgttggacaggtcgcgaaaggccgggttggcgcgcagtttttcggtgaggcgctgggtccaggtattcagcgtcgggccgtcattgctcttgagcacgtactggtactgggcgcggctggggccggaactcaagttgatgtcctggccggcacgcagatacagcacgatgcccggcaccttggcgagtttcggccgaatgcggtcgatgaactggctggcggacacatcgcgatcaccccggtctttcaaggcgatccagaaacggccgttggcgatggtctggttgctgccggtcacgcctaccgagtgcgaaaacgcttgcaccgccgggtcggccttgacgatctcggccagggccttgtgcttggcgaccatgtccgggtacgacacgtcggccgccgcttcgctggtgccgagtacaaagccggtgtcctgcaccgggaagaagcccttggggataaacacatagccgaccacggccagggccagggtcaccacgaagatcgccgccatactgcgttgatgggccagggcgcggcgcaggttgcgtgcgtagccggccaacagacgctcgctgaaacctggtttgtcgtgggcgtgatgggtgggcgctcgcatgaacagcgctgcgagtgtcggcgccagggttagcgataccaccaccgaaatcaggatggtcgaggtggctgtcagcgcgaattccttgaacagccgcccgaccacgccgcccatgaacagcagcggaatgaatgccgccaccagcgagaagctgatggacaccacggtaaagccgatttcaccggcgcccttgatcgccgcttcgcgcttgtcgaggcccgcctccagatgacggtgaatgttctccaccaccacgatcgcatcgtccaccacaaagcccacggcaatcacgattgccaccagcgtgaggttgttcaggctgaagcccatcaggtacatcagcgcaaaactggcgaccagcgacacgccgagcacactggacacaatcatcgtcgccgataattggcgcaagaacagcgccatcaccgccaccaccagcaggatggcaatcagcagggtcacttccacttcgtgcagggaggcgcggatggtcttggtgcggtcggtcaacacgctgacctgcaccgacgccggcagcatggcttgcaggcgcggcagctcggcttgaatacggtcgacggtctcgacgatgttcgcgccgggttggcgcgagatcaccaggttgaccccgggcgtgtcgccggaccaggcctgcacgtaggcgttttccgaaccgttgatgaccttggcgatatcgcgcagttgtaccggtgcgccgtccttgtaggacacgatcaattgcgcgtagtcctccgggtggaacaactggtcgttggtcgacaaggtcgacacgctgttctggccgtagatcgcgcccttggccaggttgaggctcgattgctggatggccaggcggatatcggcgagggtcaggccgatggcggcgagtttgtccggggacgcttgcacgcggatcgccgggcgttgctggccggtgatgttgatctggccaacgccgtcgatctggctgatctgccgggccagcagggtttccacgtagtcgctcagttcggtgctgggcatgctgttggaactgacgctgaggatcagtaccgggctgtccgccgggttgacctttttccaggtcggcaggctcggcatatcgctgggcagcttgccggacgcggtgttgatcgcggcctgcacttcctgggcggcggtgtcgatgctcttgttcagggtgaactgcagggtcagcaggctggagcccaaggcactgctggaggtcatctgggtcatgccgggaatggcgctgaactgcacctccaaaggcgtggccacggacgaggccatggtgtccgggctggcgccgggcagggtggcggtgacctggatcgtcggaaactccgcttccggcagtggggcgatggccaggcgcgggaaggcaatcagcccaagcagcaccagggcgaaggtcagcagcagggtggcgaccgggtggtcgacgcaccaggctgatggcgaacggctcatggccgcaccttggcatcgacggtctggatgacctgcggcggttccttgagcacctccacctgcgccccggccttgagccgcgactggccgtcactgaccagcacatccccggcctgcacgcccttgatgatgttgaggtcgctgtcctggtacgtcacctgcaccggcaccacctcgaccttgtcaccgttgacccggtacacgaagtgcgaatccaggccgcgctgcaccacggtcggcggcaccaccagcgcgtttttgtcgagggcggtctggatcttgatggtcaccagttgccccggccacaggcgttgtgaggcgttgttgaattcggccttggcgcgcagggtgccggtggtggagctgatctggttgtcgatcaggctcaagtggccttcgccgagcaagtcgccggtctggccgtcggtatcggcgcccaggtaggcgtcgacactggcctgggtgggtgctgcgatcaggccttgcagggtgggcagcatctgttgcggcagggaaaactcgacggcaatcgggtcgatctgggtcacggaaaacaggccctgggtatcggctgtgcgcaggaagttgccttcatccacggtgcgaatacccacgcggccgctgaccggtgagcgaatctgggtgtaggaaagttgcacttgcgccgaatcgatggcggcctggttgccctgggcggtggccttgagctggttgaccagggcttgctgctggtcataggtctgcttggacacgccgtcgtcgacgctcaatgccttgtagcgcttgaggttgaccagcgccacctgcaactgcgcctggctttcgcccagttgcgccctggcctggtcgaggctggcgcggatcgagcggtcatcgatggtcgccagcaggtcgccggccttgacccgttggccttccttgaccagcaatttagtgaggatgccgtccacttgcggacgaatcaccacactgtgcagtgacagcaccgaaccgatcccgctgacaaaacgcggaacatcctgctgcgccacgctcaccacccgcaccggaatcgccgtgggcgccgccagtttggctttggctggacgggtcaaggcccaggctgcaacggccaacactacgaggacacccacgatcagggcggttttgcgttgaatgtgcatggggtgaggcgccagggcaaaggattggaagtgtgtgaggcctttatagcctgccaacccggtcagcaaggtgactgctaactgacggcgctgtcagtaaaggcagaccattcgtacaggtggtggttaaagatccgaggcgggcaggtatactgcgcgccagcgtggcccgcaagccggccccgcgtcatttcttgcacgctccggagcttccatgacttccccgacacaaacccctgttgaagcggccgacctcgtcgatccggccagcgccgaaggcgttgaaaaagccgagatcccggcgttcaaattccccttcaagccgggtgagctggccggggccaagaatgccgcccagccctggtacaagaacggcgccaagaacggtcacaccaagaccccaggcatggcgccaccgggtactcgccgttccatgggtaaacgttaagattaacccgctgtaatatttgcgggatgttgcctacaacgccagtcgctatttcgtcttgtaggcccgcgaccgtttcttgaaagcttgcacagcttccgctgcccccctggtttttccacagggcgcagcggagggcgctctttccggaaaaggacgtttcctgtggccctgatacacctctgtgtagcgtttgccctgttgctggcggtggatgccgttgcaggccttgatcaaccgcgacgcgaaatccgcttcgccgttgccgcgcaatttccgcccttccagagccgcaacccgcaagggcagttggtcggcttgaatatcgagttgggcaacgccctttgccagcagttgaatgtgcgctgtacttgggtcgaccaggtgctggtcgaagacttcgaacgtcttgaagcgcggcaattcgatgcaatcatgggtattgcccctacaccactacgccggcgctgggtcagtttcaccgacaacctctaccccttcaccacacgcctggtcgcacgtcgaacctcgggcctgatgccgctaccaaggtcgctcaagggcaagcgagtgggcgtattgctgggcagtaatcgagaagcctttgttcgttcgcaatgggcgcgcaaaggcgtgattatcaagagtttctggctcaacgacgaactggtccgcagcctggtggcaggcgatatcgatgcgaccctgcagggcactgtggaaattcgcgaggccctgctcgacacggctgccggccaggacttcgacttcctgggccccgccgtttgtgctgagctgttgggcaatggtgttgcgattgcgctgcgcaataccgacacggcgctgcgtgtcgagcttaaccgtgcgcttgagcagctcaagcacaatggcgagtaccagcggatcgtcgcgccttatcggctggacgtgccgtgatggctaattaattgcgcagaacatgagctggatcagtatttgccccctcggtgcgcttagagtcgacgccctgccgactcccctaacaatcacgagcgcgcttctccatgaagatcaatctgccggtcaccggtcggaatgtggactttgcccccgacgccaacatcctttcgaccaccgacctgaccagcgcgattacctacgccaaccaggacttcatcgacatcagcggctacagccgcgacgagttgctgggggcgccgcacaacatcctgcggcatccggacatgccagccgaggcgttcgcccatatgtggcaaaccctcaagagcggccggtcgtggatgggcatggtgaaaaaccgctgcaaaaacggtgaccactattgggtcagcgcgtatgccacaccggtgacccgagagggcgcgaccgtggagtatcaatcggtgcgtaccaagccggatgcgcacaggatcgcagtggcggagcggatgtatgcgcgcttgcgagcgggtaagcggctgtcctggccggtcgtcggcatgggggtgaaattgtcggcatgggtcatcgccacttgcgcggtgacctgggccttgggcttgagcctgacgggctacgcgctggtctggcagttactggcgttggtggcggggtgtgcggtgggggcggctggcgtgcggctgatgttgcggcccttggctgaactgcaacggcgggcgcgctgggtggccgacaacccactgagccaggcgatctacaccgggcgcggtgatgagtgtgggcagatcgagttcgccctgcacatgctcgaagcccaagcgggcgcggtggtcgggcgtattggtgatgccgcccagcgcctctccggccacgccgcacggttggtgcagcaccttgacagcagtcacgccagcagcctgggccagcagacccagaccgaccaggtggcggcagccattcaccagatggccgccagcgtggccgaaatggccaaccatgcccagcaggcgtccagggcggccgagcaggccggcagcgaaacccgtgaaggccacctgcgtgtggatgaaagtcgtgatgcggtgttgcgcttgtcccaggagctggcgcgggccacgcaggtgatccaccagttggaaaaccacagcggtgaaatcagcagcgtgctggaagtgatccgtacgattgccgagcagaccaacctgctggccctgaacgcggctatcgaagcggcgcgggccggtgagcaagggcgcgggtttgcggtggtggccgatgaagtgcgtggcctggcccagcgcacccagcaatcgaccgacgaaatccagcgcatgatcagtaccctgcaaggcggcgcacgggacgcggtgcaggcgatggcccacagtggcgagcatgtccaagccagtgtcaaacaagcccagcaggccgccgccgcactggatggcatcagccagcgcgtcatgcaaatcaccgccatgagccagcagattgcaaccgccgtggaagagcagagcacggtgagcgaggacatcaatcgcaacatcgtcggcatccgtgatgccggcgaggccaccgtcagtgccgggcagcagagccggctcagttcaagcgacgtggccggactggcggaggatctgcgccagctggcgcgtgagttctggtctaggccgcgcgcaacgagataaacgcgtagttggccggcacctcggtggcaatctgcgccccggcatccagcacttgctcggcgatgtccatccccgagacatggaacacccactcgttggccacggacggctgacccatcgccaactcgattgcttgggcaaacgcgcccatgtccggcaggtaagcggtaaacccatcccccttgagtgctgtggtgcgaatgccgagcaaggcgcacaccgcttccttggtctgcacatcatcacggtcggcctggcgtgagcgctggatcaactgcgtcagttccgggtccatcaactggccgcccacgatcagctccggcccctgctcccaggactccggcgggcaatccttggcggcggggttcaatgggatatgcgggttgatctccatcgggtagatgcggcacaccagcgggcggcgctcatagatacggcagcggttgtcctcgtcaagattccggcaggggccggcgttgtaggcggcaaaggtgattgccacaaacgcctcggtgttgccgctgggcacgaccaccgaacggcgttcggcatgttcgcgttgttgtgggggcaggcccaggccattgcccaggaaaccttccaccaggacgatgacgctgccgccgtcggccgcccactggcgggcttcttcgagggtcagggggacgtgatgatcggagcagcatttgccgcaacctacgcaggaaaattgagtgttcatggcagatctgtcaccaggctaggtcagagggcacgcaagaacggtgacgggtttttacctctgttcaccgttttgtctctctggaagcaagttacacgccagtgcctgtcagtcctctgtcactacgtcgcgtaggacaaatctcatgcctgcgctctcatacagctgccgagcgcgcaggttgctttccaataccttgaggtccacatagggctcgccgcgttgcttgaaggtatggaagctgtgcagcaacaacgcgcggcccaagccctggccttgggcgcaagggtgaacggagaggtgcttgatgaacgcgctggtccagcattgcgcgacggcgagaataccgtcgtggttgctcgccaccaggcaaagcgtggggtcgaactcggcgtcggtggtgaattgttgttgccaggtttccaggtgggggacgcggccgccgccctggtcctgggtcatgcgcaacaccgcatgaatcgcgggtgcaagctcgtcacggtaatgatccaactgtgtacccgccggccacagcggggcgggcaggctgccggtgaggtcgcggcgcagcagttggaagtattcgctcacaggcctttttgcgccacgctttgagcggccaccaccaggcacttggtcaactcgggagaagagaactttgtgagcaccgcgtcggcgccggccagccgggctttttcgctgttcatcgcgctgtccagggaggtgtgcagcaagatatacaggtgctggaaatcaggggtttcgcgcagggtgcgggtgagggcgtagccgtccatttccgacatctcgatgtccgacaccaccacattgatctgctccgccgtgccttgcagctccagcagcacatcgatggcttccttggcgctgcgcgcggtgtggcaagtgaggccgaggttgcgcagggtgtgtaccgattgctgcagcgcgacctggctgtcgtccaccaccaggatgcgcgcattgcccagcacttcggcttcttccatggtcaggtcggtgggcgcggcttcaatcggcgccggggcgatgccgtggatgactttttcgatatccagcacctgcaccaggccgccttccacctgggtcaccccggtgataaacgcacggttaccgccggagccgtagggcggtgggcggatgtcggtggtcaggcaatgcacgatcttgctcaccgcttgcacatgcaggccctgcttggagcggctcacatcggtaacgatcaggcagccgccgtccgggtctgccaggggcatttcgccgagggcgcggctcaggtcgatcaccgccagcgaatttccgcgcagggtggcgatgcctttcacatgcgggtgggactccggcagcttggtcagcggcgggcatgggatgatttcgctgactttcagcaggttgatcgccatcagcttgccgctgcgcaaggtaaagagcagaagcgagagtgagtctgcgcgggctttggtggtggacataaaaaccttctgtggatcagggatgacgaacatctatggaaggttatcgacttgagtgagccaggctttaaccggatttcgtgccggacggaagtcgatgtgggagggggcccctcccacattaatgttcggtcagtgtttccagacttgcgggttcaccaggtcctgcgggcgctggcccagcagggcgctgcgcaagttgtccagggcgcggttggccatggcttcgcgggtttcatgggtggccgagccaatgtgcggcagggtcaccgcattgttcagttggaacagtggcgattcggccagtggctcctgttcatacacatccagcccggcgccacggatacgctggctttgcagggcttcgatcagcgccggttcgtctaccaccgggccgcgggaaatattgatcaggattgcgctggacttcatcagccccagctcgcgggtgctgatcaggtgccgggtcttctcactcaatggcaccaccaggcacacgaaatccgcctcggccagtagcgcgtccaggctgcgaaactgtgcgcccaactcctgctccagcgccggcttgcggctgttgccgctgtacaggatcggcatgttgaaacccaggcgtccacgccgagccacggccgcgccgatattgcccatgccgacgatgcccagggtcttgccgtgcacatcgcaaccgaacaacggcgcgccgacgctggctttccactggccggccttggtccaggcgtccagctcggccacccggcgagcgctgctcatcagcagagcgaaggccaggtcggcggtgctttcggtgagtacatccggggtgttggtgagcatgatcccgcgttcgttgaagtacgccacgtcgtagttgtcgtagcccaccgacacgctggacaccacctccagcttgcttgcgccctgcaactgctcgcggcccagcttgcggccaacgccgatcaggccgtgggcgtggggcagggcttcattgaattgagcattgatgtcgcccagcttggggttgggcgcgatcacttcgaaatcctgttgcaggcgttcgatcattgccggggtgacgcggctgaaggcgaggacagtctttttcattgcaggcgggctcatcgactacggaggaatgccaagcacgctaacattccttgccactgttgtcaggggacggcagacctaaagtgggcagagaaaaatgtgggagggggcttgcccccgatggcagtgtatcggccaacacatctggtgactgacgcaccgctatcgggggcaagccccctcccacatttaatctgtatcacctgggagagatcagttcgccaggcgagcaccgctgaggctgccactcaattcatacgccaccagttccgcctgatgcgccgccagaatctccggcaacgagccgcgcaggtattccacccaggtcttgattttcgcatccaggtactggcgcgaggggtagatggcgtacaggttcaattcctgggaacggtagttgggcatgacccgcaccagggtgccgttacgcaggccctcgatggccgcgtacaccggcagcaggccgacacccatgccgctggtgatcgcggttttcatcgcatccgccgagttcaccaggaacggcgaggtgttgatcgccacgctttcctggccttcggggccgttgaaggtccacttgtccagctgaatcaccgggctgaccaggcgcaggcaggcgtggttaagcaaatcctgtgggcgctgtgcgcaacctttggtcttgacgtaatccggcgaggcacaggcgatgctgtaggtgatgcccaggcgctgggacacgaagcccgagtccggcagttcgctggccagcacgatggacacgtcatagccttcgtcgagcaggtccggcacgcggttggccagggtcaggtcgaaggtcacgtccgggtgagtacggcgatagcgagcgatggcgtcgatgacgaaatgctggccgatgccggtcatggtgtgcactttcaactgcccggcgggacgggcgtgggcgtcactggcctcggcttcggcttcttcgacataggccaggatctgttcacagcgcagcaggtagcgtttacctgcctcggtcagtgcaatgcgccgggtggtgcggttgagcaagcgggtttgcagatgggcctcaaggttggagaccgcgcgcgacacattggcagtggtggtatccagttgcacggcggcggcggtgaagctgccggcctcggccacgcaactgaaggcgcgcatgttttgcaaagtgtccatggagtgttctcaggggagataacaaattgtgacagaaagttacgccgtccagtgatccctaccaacggattatcgcctgaacggtaacaaagattcacaggaataccagcttatcgtccttcatatcgccccctagaattgcgccacctaccccgcaccaccacctcaggaagtcgcttgccgtgccgcgtcgcatcagcagagagctgaagactctcagtgtttgggccttatcgttagcaatcagcggctgcatcggaaccggaggaatcgccccacaaggccagtccctgaacgccaataacctggccaccgacgacgccatccagagcgccgcacaagacgcccactggcccaccgcacactggtggcaagccttcggcgatccccaactgaaccgctgggtcgacctcgcgacccaacacagcccaagcatggccatggccgccgcgcgggtgcgtgaagcacgggccatggccggggttgccgagtcggccgagtcgttgcagatcaatagtgacaccaccctcaagcgccacaactggccgaaggatcagttctacgggccaggtgagctgagcggtgccaacacctgggacaataatgcgtccctgggcctgagctacgccctcgacctgtggggccgtgaaagcaatgccaccgagcgtgccgttgacctggcccacatgagcgccgccgaggcacgccaggcccagcttgaattgcagaacaacgtggtgcgcgcctatatccagctgtcgttgcagtacgccaaccgcgatatcgttgcggcgacgctggcgcaacagcagcagattctcgacctggccaacaaacgcctggacgcgggcatcggcacccacttcgatgtgagccaggccgaaaccccgttgccggaaacccatcgtcaactggatgccttggacgaagaaatcgccctgagccgtaaccagttggcggcgttggcgggtaaaggtccgggagacgctgcgcagttgcagcgcccgagcctgtccctcgccgcgcccttgaagttgccatcgagcctgcctgcgcaattgctcggccagcgcccggatgtggttgccagccgctggcaggtcgcagcccaggcccgtggcatcgacgtggcccacgccgggttctatcccaacgtggacctggtcggcagcctcggctacatggccaccggcggcggcatgctggagttcctggcgggcaagaaattcaactacaacgtcggtccggcgatcaccttgccgatcttcgacggagggcgcctgcgtgcgcaattgggtgaagccagcgccggttatgacatcgcggtcgccaggtacaaccagacgctggtcaacgcgctcaagggcatcagcgaccagttgatccgtcgcgagtccatggacaagcaagcgtccttcgccgcgcagtcggtggcctcggcgcagaaaacctacgacatcgcgatgatcgcctaccagcgcggcctcactgactacctcaatgtgctgaatgcgcagacgttgctgttccgccagcagcaggtgcagcaacaggtgcaggccgcccgcctgagcgcccacgcggaattggtcaccgccctgggcggtggcctcggtgccggcagcgacgtaccgcaagacgccaagaccctcccgagcaagaccccgacggcactggccgtatttgatcactgagtaggatttgatgactcccttgcctgcaccgctgcgctggctgcatgcccttgagtggcgccgtggttttttcgactgggcacgcagcgacggcgtgacctgggtgtatatcttcaaggtgctggccgccgcattcctcacgctgtggttggccatgcgcctggaattgccgcaaccgcgcacggcgatgatcactgtgtttatcgtgatgcaaccgcaaagcggccaggtatttgccaagagcttctatcgcttcctcggcaccctggcagggtcggcggtgatggtgctgttgatcgccttgtttgcgcagaacaccgagttgttcctcggcgcgctggcgatctgggtcggcatttgcaccgccggtgcgacgcgcaaccgtaactttcgggcctacggttttgtgctggccggctacacggcggcgatggtcggcctgccggccctggcgcatccggaaggggcctttatggcggcggtgtggcgggtgctggaaatctccctggggatcctgtgcgccacgctggtcagcgccgcgatcctgccgcaaacctccagcgccgcgatgcgcaacgccttgtaccagcgctttggcgtgttcgcgctgttcgtcaccgatggcctgcgcgggcgcagccaacgtgaagggttcgaggccagcaatgtacgtttcatcgccgaagccgtgggcctggaagggctgcgcagcgtcacagtgtttgaagacccgcacatgcggcggcgcaatggtcggctcagtcgcctcaacagcgagttcatgagcctcaccacgcgcttcaatgccttgcaccagttgcttgagcggctgcgcaccgatgccgccgaccacgttgtcgccgcgatcaaacccggcctgcaggacctggctgaagtgctcgatggtttctcgggtcgagcgctcaccagtcccgacgcggcgcgcctggtcaatcaactgagcgcctacaaggacggcttgcccacaaaagtgcgcagcctgcgcgcaacgttccaggaaggcgaccccaccgaagccgagcaactggatttccacaccgcctacgagctgctctaccgcttcgtcgacgacctgcacaactatgcgcaaacccacgcgtcgttggccgatcacagccatgcgcgtgagcagtgggacgaaacctttatcccgaagaccaactggctggcctgcgctgcgtcggggattcgcgcgtcgtttatcttgattgtgctcggcagctattgggtggccaccgcgtggcccagcggcgcgaccatgactttgattgccgccgccaccgtgggcctgtccgccgccacgccaaaccccaaacgcatggcgttccagatggcctgcggcaccttgatcggtgcgttggtgggctttgtcgaaatgttctttgtgttcccctggatcgacggcttcccgctgctgtgcgtgatgcttgcgccggtgatcatcttcggcgcgtttctcgcctcgcgcccgcagtacgcgggtgtcggcgtgggcctgttgatctttttcagtaccggctcggtgccggacaacctcacgatctacaacccctacacctttatcaacgactacatcgccatgatcatcggcatgctggtgtgcgcggcggccggtgcgatcatcctgccgcccaacagccgctggttgtggcgccgcctggagcaggacctgcgtgaacaggtggtgtatgcgatcagcggcaagctcaagggcctggcttcgagcttcgaaagccgcacccgcgacctgctgcaccaggcctacggcctcgccgtcggccagccgcaagtgcaacgcgacctgctgcgctggatgttcgtggtgctggaagtcggccacgcgatcatcgagttgcgcaaggagcaggcgatcctgccggtgcacccggcgtacgccgagtcccagccgtggcgccaggcgatccgcgtgatgggccgctcgctggtgcggctgttcctgcaacccagcgcgagcaacctggagcgtggcctgattgccgtcgaccatgcgatcagccgcgtgcaggccaccgacgaacccttcgccccgcacttcgacacctcggccctgcgccgggtgaaaagctacctgcactttatccgcacctcgttgctcgacccgcaatcgccactcgctgcctttaaaggagctgcgcatgccccgtgaaatcgccttccacggcatctatatgccgaccatgaccctgatgtttctgatcgcggcggggctggcctggggtgtggaccgcttcctggccgggttcgacctgtaccgttttttctggcacccggcgttgctgcgcctgagcctgttcgtctgcctgttcggcgccctggcgctgaccgtctaccgttgagaatgccccgatgaaaaagtttttcagcctgctcgcgaccttgctggtactggccctggcgatctggattggccgcacgctgtgggtgcattacatggaaactccatggacccgcgacggccgtgtgcgcgccgacatcatcaacgttgccgccgacgtcaccggcgaagtggtcgacgtgccggtgcgtgacaatcagttggtgaagaagggtgacctgctgatgcagatcgaccccgagcactaccgcattgccgtcaagcaggcgcaatccctggtcgcgtcgcgcaaagccacctgggaaatgcgcaaggtcaacgcccatcgccgggcggacctggatgcgctggtgatttcgaaggaaaaccgtgacgacgccagtaacatcgccgactcagcattggccgattaccagcacgcgcaggcgcaacttgaggccgctgagctgaatctgaaacgtacccaagtgctggcggcggtggatggctacgtcaccaacctcaatgtgcaccgtggtgactacgcacgtattggcgaagccaagatggccgtggtggatatgaattcgttctgggtctatggcttcttcgaggaaaccaaattgccccaggtgaaagtcggcgacaaagccgatatgcagttgatgagcggcgagacgttaaagggccatgtagaaagcatctcgcgcggcatctacgaccgcgacaaccccgagagccgcgagctgattgccgatgtgaacccgaccttcaactgggtacgcctggcccagcgggtgccggtgcggattcatatcgatgaagtgccgcagggggtgttgttggcggcggggattacttgcacggtgatcgtcgataaggcccgttagccgagaaacccgcgaatcacaccgacgccttctggagtgatcccgagggtgtttgccgccacaatgattctttggtcgcctcgctcggtcaacagtacaggatccgtcaccacgggggactgcatgtcggtatagccctttctgtcgaagatcaggtccagggtgccatttgctttgaagcgggccacatagatccaaccaccccgagaagcggtcacgatgttcccggcgttggtggacatcacgcactgccagccattgtcacgtttgttatcgaattgactccgtagaagctgaccattgttgaatagaagatgtggcgcgccgccgggcgtaatggcccgcaggaggccctgcgtggttcccgcgccgatcactccaacctggcccgcagccacgatgctgttgtctgcgcgttctacaagggcattgaaggtcgtgtgctcgccgctgatgccaacggtgtgatagccaggtgtttgagggagaccaaaggtagtgtcgagtgtaccgtcatggttgagccgtgcgacaaaggcggtatcggtagcagggtcaaaacgggcatgaccgacaataacaattttatggcggttgccctggctgatacaggcgttgaccgcagtagccgcgttggcgacgggcaatttgaagtccagccttccattgccgttgaggctggggtccagctgcccatttggctgcaagcggaacaccgtcccgttcgtcatcgtcggcgctgcacgctgtgcgtagttggcagtgaccaggatgctcccgtcgtgttgcaggtatacggttgccgagtcttcagtcagcccttcactttggtgggtcagcaggatgcacacacccgcgttggcaaactgagggtcgagtgtgccttggctgtcgaaacgagcgatgaccaagtctgcccatggcgtgtcttgatcgcgccatgtccaacccagcatcaggatttttccatcgggctgaactgccagccttgagcctccggcctgtgtcaggggcaagaacatgcctgacaccaagccattgttaccccatgagtcatccaggctgccatctgtcttcaggcaacccaacccgaatacgtagttgccattgtgaaagaggttggcgctgaacaggaccttgccgtccaaggtggtcgtcagccctttgaaatgatgggtgacgatgaagtcgggatgttttttgagtatccactccagcgcggccacaccattgttaccgaaattggggtctgggctaccgggttgttgcgaagaggcgcttgggaggttcattggcgtgtcgctccatctgctgtcagaaaggaccggcctcagtctgttggtgaatgaatgcctcgtctactgtcagatctgacaggtggccggggctattgcaggttgccaggtgtttgcgccaacaacgtctcatgcaggtggcgccacaaaagcacaccactggcctgcttctcgaacaccacggttgcgcggcgatccgtctgcgtgccgctggcgtccacttgatgctcgcggtaagtcaccgttgccccacgggcatgccggtcgatcccggccatctcgctcaaggtgatcttcaacccagggcgcatgccgcctaaacgcgtgaacagtgcattgaccccggctgcattcacccttgcgccggtagcgggggcgatcatgctgaacgccggcgagaagcgggcgagcaacgtctgcaaggtgccttcgggtgcgacaccggcaaaccattgctcgatctcgacgtgggtctggatcacttcttcaaaaaaatcgctgtagtcgatcatttacaaactcccattcaaaccaaaacgtttcttcaacaccttctccaacaaccccttgggcaacaacgccgccagcagcggcaacgcgcggctgccgttacccgaacgcagcaggcgcggcggttgcgactgttgcacggccttgagcacatccgcggcaaactcattggcgggtgtcggcttgtcctgggacgcctggctgcgtgcgcggatgccgtcgcgcaatggccaccaaggggattgctcgttgatcaacagttcggcctggacaccggcgttttttgcgaagcttgtattgatcgcacccggctgcacttccatgacccgcacgccaaacggcgcgagttccatgcgcagggcatcgctcaaggcatgtacggctgcttttgatgcgcagtaggcaccggcaaatggcgtgaccaatacgccggaaacactgccaatgttcaccaccaggcctttgttgcggcgcaggggcgggaacagcgcctgggtcacaccgacgatagaaaatacattggtctcgaactggcgttgcatggcctcggtgccgccatcgagcaacgggcccatggcgccatatccggcgttgttgaccagcacatccagatcgcccagctgttcggccaggtgttgcagggcggtgctgtcgttgacgtccagctcgaccgcattgaagcccgcagcggcaagggcggcgacatcttccgggcggcgggcgctggcccacacgctgtagccggcggctttgaacgcgtcagccagggcacggccaataccactggaacagccggtgatgagtacgttgggcatgggtcagtcctttgtcagtccgagaaactgccttgcaggtgctcggcacgaaattccagggtttgcgggcgatagccggggcgcaacggcggcgtgggcaggcagtcttcccaggtcgccccggcctgcaactccccagggccgcgatagcggggggcggcgtagacgttgtcggccaggttgaccgagtcgcccggtgcataggcggcgacgcgccagcgcagttcggtcagcggtacatcgttgccgttgttgagggtcaacttgagcgggcggtcggccgggcactcttgcggggcgtagctgatgcgcagttccaggcgtgccagttgcgaggcttcgcggttgtccagccataccacccagattgctacgaagcccaggcccacggcggcggcgagggagacgggcaaggccttggcggggtagcgcagcagcaggatcagccaggtgatgatcaggagaacgccgaagaacatggagaccacctcgaatagggaacgagcatcctaacttaagcgtaggtgggattggcgaccttgagtgctgtggtgactgtgagagcctcatcgggggcaagccccctcccacccttgatctgtgaacacattcaactgtgggagggggcttgcccccgatgaggcccttgcagttaccccaaaagcccaaacaaaaagcccccacccaacccactgcggataggggacgcaatgggctgggcgagggcttcttgtacgactgttttactgcgcgatagttttcaccgacacgccacgttcaaccggtgtggagcgaccgtagatatcttcgaagcgctcgatatcgtcttcgcccaggtagctgcccgattgcacttcgatgatctccaacgggatcttgcccgggttgcgcaggcggtgcaccgaggcgatcgggatgtaggtggactggttctcggtgagcaggaacacgttctcgtcacaggtcacttcggcagtgccgctgaccacgatccagtgttcggcgcggtggtggtgcatctgcagcgacaggcatgcgcccggcttgaccgagatgtgcttgacctggaagcgcccgcccatgtccaccgagtcgtaggagccccacggacgatagacttcgcagtggttctgggtttcgctgcggccctggtcgttgagggtgctgaccatctgcttgacgccctggaccttgtccttgtgggcaatcatcatcgcgtccttggtttccaccaccacgatgttgtccaggccgatcaccgataccagtttgccgttgccgtggatcatgcagttgcggctgtcctggatcaccacgtcgcctttgctgacgttgccgtggacgtctttatcgttgaccgcccacagcgaggcccagcagcccacgtcgctccaaccggcactgagtggcaccacgcaggcgcgctgggttttttccatcacggcgtagtcgatggagttgtccgggcagcaggcgaaggtggcttcgtcgaaggacacggtatcggcatcctgttcgctgcgttccagggtcagcaggcaggtatcgtagatgtccgggtcgtgctttttcagctcttcgaggaagcggctggcgcggaacaggaacatgccgctgttccagaagtaaccgccgcttttgacgaactcgatggcgcgtttttcattgggtttttccacgaactgctcgacgcggctcacgccttccggcagcagcgaatcgttggtggacttgatgtagccataaccggtttccggacgggtggccggcacgccaaacagcaccatctcgccacgctcggcagccacggtggccagggccagggcgcgctgcagggctttctggtcgtcgatcacgtggtcggcgggcagcaccagcatcagctcgtcacggccttcgttgaccagcatcatcgcggtgagggccacggccggcgcggtgttgcggccgaacggctccatcaggatgcgttggctttccaacttacgggcggccagttgttcgttgacgataaaacggtggtccttgttgcagaccacgatcggggtgtccatgccttcgaacaccaggcgctccagggtttgctggaacagcgtgtgctcaccggtcagggccaggaattgtttagggaactgtttacgggaaagcggccaaagacgtgagccgctaccaccggaaaggatgactggaatcatgggggtttctccttgaatcgatttgggtcagagctacgaaggtttgtcgtttcactcttgtttttgtctcggtccgggttggtctcaaccaacccggaaaaatgctttagcgggtcgacactgggcgtttcacccagactggcgacaagctcgaaccggaacctgtgacgtacagcacggctgcctcaccacgttccagggccactggcttcacatcgccgactttcttgtcaccgtcatacagcgccaggctcaccttcaccgggttgatctcacgctcgccacggcccttggctgccaccgacttgaccacatcggtcttgccatcggcggttttcagggtcagggccttgtcgctgaggttctgcacgcgcaccagggacttctgcttgttcttgaacggcggttcttcgatcagctgtggctggccgctgccgctgttgaccagggtgtagtagtggtctggagcgagcttgaccggtacggtctggctgccgaccttggcgctgtagtcaccgccgggcatgaagctgaagtcgctgctggccagtggggccacgtcgctcaggttggtggcgccaacggtagcgctgacttcctggttgctggcgttgtagatgcgcacgaagctcgagccttttggcgcggtagggccgtacagggcggcgtcgccaccggcgaaggcggacatcgatacgaagctcaaaccggctgcaatggccagggttttagcgagacgacgcggagttgtagtgaaagtcatgtgagttacctctctttcagttttgcgcccggtcgggcgtctcggatttttgagtgttcaaagccatgttctgttggcgcgaaccggcttgtttaagctgcgcaacccacgcggggtcggcatcaccgatttcgttgttcacgggcagataacgttcaggaaactcccagatcagcacctggggcgggctgttcttgaagtcatcgcttttcaggtagctgagcatcggcaggatcgggccatggccgtcttcggcgtagctgaccacgtcgctgcccagggcttgcttgagggcaccgacgaagttccagttggggttggcgctgtagctggtgcccaccagcgccaccggggtttcgctgtcgctgaacagcgcgtcgtcacctttggtttcggccaggtgcgtgacacgtttttgcagcggctcttgcggtggcatcaggttttcgaacagcgggtccagcggcaggaacagacgcaggtcgcctttgtgcggtgtggtgctctcggcctcggtgacaaaacgctggggctcgccgctcagtggggtcttggcggcaatggtcttggctagttgcttggcggcgatttcagcgccgtccggggtccagtgggtgtcggtgcgcaggaacacctgcttgccgccgagcttggcctgttgcagcgggccgagcaggtccggggcgatgatcttgtcggcggcgacacgggcgtggaagtcctggtaaaggttggcgtggatgctggccggtttcacttcacccaggtgttccggatacaggcgcaccttggccggcacgattgccatcaccagttggatgccttgggccttgagcttctggcgcacgccttcgaccagcgcgtagttaccttccaggttctggtcttcgttgacggcggggttgaactcctcgtcgctgtacaaccagtgatcgcggcccaacaccacaccagggcggccttcattgaacagcttgtagtccagcgccgcccacaggttggtgcccaggcgcttgatcgggaactggtcgtcgtagtgagtctcgaccgccttggtccagcgaccgttgagcacggtggcgtcggcattggtgctgaagccgaagaagctgcgcagcgaccaggcgcccagggcgagcaacaccaccaggaacaggccgatatagaggacgcgtaatgaacgggtcatggtcggctccctcagaattggaagtaaaggaacggcgagaaactctgcgccgacagtttgagaatcgacgccacgaacagcagcagcaccgcagcgcgcatggcgtagcgtggccagtcagcggtccagtaggccggttgcacagcggcatcctggcccacggtgaagccgggctggtggatgctgccggggttgtcgcccggtacggccttgatcaggctcgggtcggccggcttggtcttctcggcagggcgattggtgtagaagtcgcgcaggccaaagaacgccagggttgcgtaggccaccaccagggttgccacttgcaggccggtgaggttggcgcggttgagttccgacagcgaccactcgccaaagctgaacatcgcaccgtacatacggccggcgacgtgcaggttttcggcgcggaagatcacccagcccatcaccaccagcaggaaggtgaaggcccagcgcaccgggttgaagctgcgcggcgaagtgttgaggccgatggctttttcaatcgccagccacatgccatgccacgcgccccacacgatgtaggtgatgttcgcaccgtgccacaggccaccgagcagcatggtcaggaacaggttgcggtaggtggtcagcgtgcctttacggttgccgcccagggtgatgtacaagtagtcacgcagccaggtggacaggctgatgtgccagcgccgccagaactcggtgatcgactggctgatatacggctgcttgaagttttccatgaagcggaaacccatcatcaagcccaggccgatagccatgtcgctgtagccggagaagtcgaagtacagctgcgcggtgtaggccagtgcgccgagccaggcatcaccggtggtggggttctgcagggcgaagcagtggtcggcgacgactgccagggtgtcggcaatgaacaccttcttgatgaaaccctgcatgaaccgcgtgcagccctcggaaaatttgtcgagggtgtgggtgcggttgttgaactggtcggccaggtcgcgaaagcgcagcaccgggccggcaatcaggtgcgggaagatcgccacgaacgccgcaaagtcgatcaggttgcgggtcgccggggtatcgccacggtacacgtcgatgatgtagctgatcgactcgaagatgtagaacgagatcccgatcggcaacagcacgtgggtcaggatgaacggctcaaggcccgccgacttcatcatcacgttgatgctgtcgacgccgaagttggcgtacttgaagtagccgaggatgcacaggtcgaccgccacgccgagcagcagccagcgctgggccggcttggtgcgtacgccggcggcaccgaccttgaggccgatccagtagttccacagcgtcacggcggcgaacagcgccaggaagtccactcgccaccaggcgtagaacacgtagctggcaatcagcagcagcaggttgcgatagcgttgcccgctcaaatagtacaagccgagaaagatcggcaagaacagaaacaggaacacattggacgagaaaaccatcccgatctctccatgtttaaccaacagtcaagggccagagcccccccaaacccccccacgaaaaatcgggggcgggccgtacaacattccaactgacgaaaccgactcgaactgtgggagggggcttgcccccgatggcggtgtaacagtcgccatctgtgttgaatgacaccctgctatcgggggcaagccccctcccacatttttctaccgtgttttgtcaggaacccttgttgcctttctcatgcgtcgggtcgtagaccttggtcaggtcgcccccgaggcggaaggtcttgaacggttgcatcccatgcttgcgctcgatcacgtccggcgcgcaggtgtagagggtgcagaagggttcgagccaggcgaatttcatgtcctgcttcaagtccttcatgtcctgttccttgccgttcttctgttcaaagacctcgggatccttgaccccggcgagcactttgtcgcccaggcgcttgagcgcgctgttgttttcctggcgcaggtccacgccattgaccagggcaaaactggcgatcatcgacagcggcggcagggcgtagttgtggtacgacagggcgcgttgctgacgcttcaattcgttgggcaggaacccttggtcgtcgacctggttcacgccgaccttgtattccttcaccgcccaatcaaacaggtcgcgacggttggtggcgacggacgttgccatcaccgaccaggcggcccagtaggagtggttgttggttttttccagcggcaggttgtcccagtcgctgaccacttgatcggcaagcttgttgaaccaggcttcgatcagttgcgattcctgctggtgattggccaacgggtgcgagtcggagaacttcaggcgcacataggccgaggccatgctgcccagcgcccatttgcgcatggatttgccggtgtggttgaagtccttggacatcaacgcatcggccttggcccacgacaccagccagttcagagtgcattcgagctgctcgggacggccgtcacgcatgaactgcatcacgcgcttgctggtgtctttttccagcttggtgatgtcggcagtgctgtcacggaaggctttttccgactgcacgttcagggtggaccgggctttgtccgagccttcgtacttgctgcgaaactgcagcggcccggtgtacggcgccggcatggtgtcgcagttttccttgaagtcgccggtcttgaacgcttcaatcggtgcgaaatagccttgtggcggacgcagcggtgcggcggcgttgacggagcctgcgaacatcgccaggcccagtaacgtagggatcagtaacttctgcataggtaacctcattgcccgagggaggcggttttttggccgccgcttgggaatacgttgcgtgtgcaaattttcgcttcgaccttctgcgcagcagcgcccgcttcgggaccctgcacttccacggccagcaggttctgcgaggcccagtcttcatcggtacgcagttcaaaggcgaaacgcccgtctgtatcggatgtttcgggtttctcgatcttgatgtcctcgtggcgcccgttcatgtaccagagggtggcttgcagggttttcaccgacggatcggcgaagcggatatcaacctggtgattggcattacgcaggtctttgttcgaactgttcaccagcaattcgttcttgccgggtttcaacgtggtgctcgcggtcatctgcgcggtcttgccttcgcagccgttgtcgagcagggccatcatctggcggtagatggtctcctggtccaggcgatacagcggcgagaactcccagatgaggattttcggcgggctcttctggaattcatcgctgcccagatactgaatcatcgaaccttccagaccaccgccggggaaggcgacgttgaggatgtcggcgccgatttcctgttccaggaagccggcaaagttgtagttcttgccgctgtggctggtgcccaccagggtgatctgcgggttgcccgaatcgccgaacaggtcgccgtcgcccgcttcgcccttgggctcggtggtgaactggtccatgtactggatcgcgtagctggtgccgcacagttgcccggccatgttgtgcagggtgccggtcttgcccatgcgcccggagcgcttggtttcgaattcgcgcttgggaatgtccgcgaactcgggcatcgcacgcactttggcaccgacgatttttgcggtgcgctgggcgccgtacggggtccagtgctggtcgccacggaagtagaagtcgtgggcgggcagttcatccggcagttgctcgttggtcaacggcgacaggtctggtaccacgtagcccatcttggcgaagcggccgagcatggtcttgtagttacccagggccttgtcgaagtcgaacttggctttctcttccgggttgagtttgttgcggttcaccaggccacgggtcggctggtagaccaccaccagttccacgcccttggccttgaacgcgtcgtgcagctgttgcatgcgcttgtagccggacggggtggtgtcgaattcggtgcgcaggtcttcctgggtccggaacaaccagtcgccctgggcttgcaccagggtggtgaagttctgctgatagcgcgtggtgtagttgcgcgcatcatgggcggccgggcacaggctgcagcacggttcggcggtgaaggttggcgccttgacttcatcggcgcgtacgccctggctggccgcgagcaggccgagggtcagacccgagaggctcagcagtttgatcatgtgtgggtgcataagggtcatcctcagtcctgcatttcggtctggcgttcgacagggtcgatcagcacggctttctgctggcgcaccagcaggtcgagaatctcttcctggcgatcgccaagcacgccggagaagctgatgccgctggatttggtcggcgccagcatcgacacgcggtacagctcgatgctcaacggcgagtcgatggacagcggcccgctgccgttacccgccagttcaccgccgaccacgatcagcgagaccttggcgtcgaacgggtcgagggcgatgtcgcggtcggtgtcggtcaaatccttgatgtggccgtacacaccggtcaggccgttggccatcgcggtgttctcatacagcttgatgttcacgctgttgcgcacgcggatgccgtggcggcggttgctgatcaccttgttaccccacagcaggttatcgccgctctcatagagggtgatgccgtcggtgtggttgcggtagatctcgttgtcggcgatcaggttgttcacgctgttacggtcgatcaccaggcccgagagcttgttgtcgtagctgcggttgttgaagatgaagctgtcgttcacctcacgggaaatgatgatgccgtgcttcttcttggtgccgtagacggtgttgtccgcgatgatcaggccgtgggaacggtcgtgggggtcaatgccgtagacgatgttgtctttgtaggtattacccttgatcacaaagcccgtggtctcgtagcagtagaagccgtaccacatgtccgagaactcggaatcgatgatccagccggtcggctccggacgcttgagcaccttggccatgttcggcgtgtactgggaaatactcaccccgtacgacttactgttggcgtagccaaaactggccatcttggtgttggagatataggtctcggtgccgccccaggccagcaggaacgggcggaattccttgggcgacttgaacagcgccgggccgttggccttttcgctccagccggtaaccttagtgtcacgcacaaacagctggccgtcgttgatcaggaacgaaccgccttcctgggacaggcgcagctcctgggtcttcttgtcgatttccaggatgcccttgcgcccgaccacgatcggcaacttggccacgatcactcccggcgaggtctcgctcaggtactgcttgggcaccttgcccagcaggtccttgaggttcatgtagccgtcgtcgacaaagatcgcctggggaataccgtgctgacgcaccacccattcggccatcttgttgtcaccgccgatgaaatccttgagcgcatcttcctgcatcatgcggcggatgctgattttgcctggcttggtccttacgatctttttttccattgccgcggcggtgtagcccgacaggtccggcagggccggcttggccatttccagcggcgcggtcggcgggctggagatggtgtaggtcttggcctgctgcagttccttggcgatggtcggcgccttggccgccgtatcggcaaacgctgtggcactggccaacagcattgccgctacgagtaggctttgagcattcattgggcgggctcccatcagaatttccagatcacgtcgacaaacgcgcgatgcatgtacgagtcgacgttgctgccataggcatcgcccggtttgaatacgccggcacggaaacgcaccagcgccgatggctcatcaatcgactggctgagcgccgccggcaacaggccggtcttgaagtatttggtgaccaccaggtccatttcctgacccaggtctttcttgccatcttcaagcggcagggaagtactggacaggatcgcgccggtgacgtcgtcggtgttgttctgcactgcatcgataccgttgctgcccaccggcttgttgccgtcgacacgccagaacttgtggtacaccaggctggcgtcgtagtcctcgcgcagctgccaggaaccgaacaggctcatggcctgcatgttgttcatctcaccacggaaggcctcaccgaagcggtgcacacgggactgggtgccggtccagttcgaacggttgctttgcaggccgttctgctcgtactcggcgctggcgcgggagtaggccgcgccgacttgccactgcgggtcaaggcgcaggcggatacccaggtcagtggcccagccattcacgttatcgctgcgcttggcctggtcggggcggctgccgtcggctttcaacgcgttgacggtgtcgcggtcgccctgcatgccggtgatgctggcccaataattgacggtgttggtattgcgccagttgtaggcgtcgctgttggcttcgataccgagccaggtcaggtcgccgttttcgcgcttgtccaacgagtcggtgggtacgcccggttccgggtagtcgagcttgccgttgtcatgggtgtggtgaccgcgcaggccgatccactggccgggcgtccactggtaggcggcgtcggcgtagaggtgctgacggtccttgtccttgggcgacagctccttgaggtcggtacggtactcgctgaaacgttcggcgacgccgacattggccttgagcagggtggtgtcgaaggtccagttcagcgcttcgatgttggtgtcgcgccattggccgtcgtcattgcgcaggcgttggcgacccagcttgaggatctcgccggggtagggcgtgaagccgctgtagccgacccagaactcgcgcatggccaggtagtttttcttggccttgcggtcgttgttggtggtctgctggttcgcgtcatcggccgactgttgcagcgggtcggtctcgatgatgtcgctggacaccaccgcctggcccatggcgtaggcgctccacgcgccgctttcaccgtagatccacgggcgcaggtcgaggccgacgccgttgacgtcgccgcctttctgcgtgccgaggtcgcggtcatcttcggactgtgcggtggctttgacttccaggccgaagttcttggcttcggtcagcgcggccagggtcgggcacgaccacagcagggcgaaggtcaggccgatgccggccttgacgaatgggttgagcttcatagggattcctcgccgtcgtcttcttcatccagggcgtgcagttgcaacgtgctctgggccagggtgccgcgggcggccagttcctgttgcaccaggcgttggccctgggcgcgttgctccggcgtcaagggcgcttcgagctgggtcgccaggtcattggcttccggggtgtcctgggctttggccagctggctgaagacataggcgttcaatgggtcgggcttggtgcccttgccttgggaaaacaactgggcgatggcgaagtcggcgctgttctggccgttgcgcgcagcagtcagcaagtggtcgagggctttttgcgggtagaccttgcccaggtagccacggcgatagatctggccgaggtagtaatcggcggccacttccttgcccacggctttttcgaaatgcgcttcggcggccttggcatccgccggcacccacttgccttcgtagtagagcttgcccagcaacagctcggcgcgcggctggtcggcggcgcggccgttgtccaggtacttcatcatctggtcgacgtcgccgagttcggggaagtcgtagagcagttgcgccaggctgacccatgaagccgggtagccgggggcgattttttccagcagggcctgggcggttttttcgtccggctggccgagggtggcgtcacccagcacgcgcgccacgctatcaacacgttgtgcggtgacggtgccacggctgtagccggcttccatctgcttgagcagctcggcctgtttttccggctcggcttttttctggtagaccgtggccagttcgacgtagcagatgtcggtggtgttcagcgcggccttgcagatgcgctccacgtcatccagatgctggtcgtaggtgtcctgggtgcgatacagcagcacctgggccaggccggcttccgggtaaccggcggcctgccattggctgatctgctgctgggcattcacattcgggaagctgtgcgggtattgcaggtacagcatcgccagcgggatcagggtattgccttcgccattggcaaaggcttttttcagcaggccttcggcttcatggtgttcggcctcggtgctgccgggcttggccaccagcaggcgaccaaggcgcgcctgggcgcggggcgaggtatccgccgccgcacggtaggtggcttcggcctgtttgatttgcgccggatcgcgggtgcctacctggatgtcggccaggcccacctgggcctcgctgtagcccaggtctgccagttgctggtaattctgctgcgcggtgacggtgtcgccacgcttgagcgcttcattggccaggcgttggtcgggcaggccggcgcaaccggcgagggcgatggccagcgccaggggcaccggcaggtttcgaagggcgctcatgattaaagacccgcagccatggctttatcgatcagccagttcagcgatgggccacggtcgctggtgacttccaccgggcgcccggcgtaggtgctgtccagcggtgcgtccggcttgatctgcacgcggatgtcggaggacaggtcggcgctgttcaggctggtgctgctgacgatggtgccggtgcggatctgctcttcgtcggccacctggaagctcaccggtgtaccggggcgcacatcggcgaactggcgataggtgaagcgcgcctccacgttggcctggctaccgcgtgggaccagttggaagatcacgtcgcccttgctggcgtactgaccgtcagccaccagttgctgcgccaccacgcaatcgcacggcgacgtcagggtgccggtcatttgcttgccgaacagctcttcaaccttggccggttgcagttggtcttcgtccaggtggcccttgagcacgtcgagcatgctggtgctgaaggtcgccagtggcgcgcctttggcggcgaccgcatcacccttgagcaggctctgcacggtgccgtcgcgtggcatagttacgttcatgccgggcacgctgaccaggccggcctgggcatggctgacgaagtacatgccgtacaccgacttgaaaacgaaaccgaaagccgccaggccgacgatgaagatacccgcgctgaacaccacggcgcgcaggcggccggcggcgctcatgttgctgccgctgtccttgaccttgcgtgccttggtgaagttgtcgcgttgcagggtcgccagcacgtcgcccatggtcacgatgtcgccggacaggtgcgaggtgatcaggtggcgcagggtggaaatatcctgggcgtcgaggttctggaactggcaaccggtgcggccggtctggcggtcgtaggagcggatctgcagttccacgtccatggccaggccgaggttatcgatgacaaattgcaggcggcccttgtgcacctcgccgacggtcaacggctgggtggcggtgaacgccaggccgccggcggacaggtcgatcacccgtgcttcggtctgggtgcggtcggtgttgaagaagcgcagcttggccgggattttcacgcgggcatgttggcgctgggcttcggattcgtggacaacgttggcgtttactgggctgttcatagttcggtttcctagttaattcaggcttggcagggtcagaccatcatcagcaacacggcaacgaagatgctgccggcggagaaggtcatggtccgagacgaccaggtgttgaaccaacgttgaaagctggccaaatcgcgggtcagtttggtgtcctggcgggtccaggactgttgatcgaggcggaagaacacgtagatcttcaccagcgcgcccatgatctggttgtaatagagaatcaccgggtacgcggggccgatcttgtggccggagcacgacagcagcagggtgagaatcaggcgagtgatgccgatccacagcaggtacgcgaggatgaaggcgccgccgtatttgaaggtggcgatgatcgccacggtcaggccgagcagggacgtccacatcgacacgcgctggtcgaacagcacgatgctggtgaacaggcccagccgacgcacacccaggcccagggctcgggagttctggcgcaggttgttgccgtaccagcggaacatcagcttgcggctggccttgatgaagctcttttccggcgggtgttccacggtgttgatcgcggcgtccggcacgtagaaggtgtcgtagcccaggcgcatcaggctgaaccagctggacttgtcgtcgccggtgaggaacttgaagcggcccaggcgccagtgctgcagcgagtcgctttccacgtcggcgataaagcccgggtcggtgaccacgctggcacggaacactgacatgcggccggtcatggtcagcacgcgcttggacagggccatggagcacatgttgatgtgacgctgggcgaaacgcagcttgtgccactcgctcatgatgtagccgccgcgcacttcgcagaactcgttggtggtcaggccgccgacgttgccgaacagttggaaccacggcacggtcttgcgaaccacgccttcggcgagcacggtgtcgccatcgatcacggcaaccacggcacggtcgtccggcaggtggcgggagatggcgcggaaaccgaaagccaggccgtcgcgtttgccggtgccggcgatgcgcacgaagtcgagcttcacgtgttccggtggattcatgcgttcccacaggctcttcaccagcagctcatcggacatttccaccagcgagcagaccacggtggtggggaagccacattcgatggcttcacggatcaccgagctgtagacctgcgcagtggtcagcgcgtcgatacggaaactggtgaccatcaggaacacatgggacgggtcggcagccttgcccagcttgcgcactttgcggcgcaggtgcgggtagaccacatacaggaacaacatgccgcgaaagaaatgcgtagcacccatcgagtagcgccagatgccgacggcgccaatcaggaaaataaaattcttcgactcggagtcgaacgtactcgccggcaagagcagggcgagtcccatcagcaggctcaaaaagaacagccagccggcggattggagcagtacgtgttttaacttggacataagcgtcatccgaaggtgaagaaggctcccggctgcaagcgctggggatgggaacgcttgcagcccggaacttgccgttgctgttaccagcaaatgccttcggtacggcctgtggcacaggtggccttggacatgaagcccaccaggtcgatcacttgcttgccgtgtggtgcgttctgcgccagggcacggaacttctcatcgcggttgcccaggatgatcacgtcggagttgttgatcacttcgtcgaagtccgagttgagcagggacgacacgtgcgggatcttgccttcgatgtagtccttgttcgcaccgtggacacgggcgtactcaacgttgctgtcgtagatgctcaggtcaaagcccttgccgatcagcatttcggccagttcgaccagcgggctttcgcgcaggtcatcggtgccggccttgaagctcaggcccagcagggcgactttgcgtttgtcgtggctggagacgatgtcgaaggcgttctgtacctgggactcgttgctgcgcatcagcgagttgagcagcggcgcttccacgtccagggaaccggcgcggtaggtgagggcacgcacgtctttgggcaggcacgaaccaccgaaggcgaagcctgggcgcatgtagtactgggacaggttgagggtcttgtcctggcagaccacgtccatcacttcgcgaccgtcgacgccgacggccttggcgatgttgccgatttcgttggcgaaggtcactttggtggcgtgccacacgttgcaggtgtacttgatcatttcggcaacggcgatgtccttgcggatgatcggtgcgtcgagttcttcgtacagcgactgcaggacatcgccggaggctttgtcgaactcgccgatgacggtcatcggtggcaggtcgtagtcggcgatggcggtggattcacgcaggaactccgggttgaccgcgacaccgaagtcgacgccggcttttttgccggagcagtcttcgaggatcgggatcaccacgttggccacagtgcccggcagtacagtgctgcgcacgaccacggtgtggcgggtggttttgtcacgcaggacaaaaccgatttcgcggcacacggcctcgatgtagtccagttccaggtcgccgtttttcttgctcggcgtgccgacgcagatcatcgacaggtcagtatcacggatggcgtcggcgaagttggtggtgccacgcagccggccggtttcgataccctggctcaacaactcgcccagaccgggctcaacgatgggcgatttgcctgcattgatcaggtcaatcttgtccttggagatgtctacgccgaccacatcgtggccacgggcagacaggcaaccggcacagactgcgccaacgtaacctaaaccaaatatgctgatgcgcatcgcatttacctctttgtcttcaagaccgtattaatcatgccaataattggccggagttcatgtttgcaagcgtcactgatgccacggaagttgggcgaatagacgcctacttaccgcgtacaggcatgttaattagtgagtgactaactattgcactcaagttgtgcgcaacttggccttgttattggggcttgccctgaaatgcagccggcctttctggggaaaggtgccgacgccagtgccgcaagaccctgatagaggcttttagcctttatttatcaacgtcttgggtgtcatcactgacacatttgggtaagcgctgccttggcctataggggatagcaattgatccttatcgccgccctcaactcatatcagttgatgatatgacccgtgagtcaaagttgatgaggtaactttgctacttccttgggtcgtcatgtaagtcatctcttacagaaacagagaatttcgttaccggtggtatgagccgtgggtttaggcgaagttccgggccgctcatcctgtttcctgaaatttcttgaaatattaggaaagatggcactggtagtatattgatagcacttgctatttgggccagtagttatagggagttggcgcgcggggatagttttgtgccactagtgtttgaaaaaagtggtgccactacgaaaaaaatcgacgaatgtcgagtgaaagaattgttagagatgcgtcgggatattttttgacgtcaaaaaaatgacgattcgcgaattaaaatgcggttaaaaatgtgggaggggacttgcccccgaagacggtgggtcagctaaagataagctggctgatcgatcgtcatcgggggcaagccccctcccacatttgttcatcagtgttctcgggagctttattctggtgcgtgatcgcgcaaaaacaccaggttatccggcttggactgctcggcgttgaagcgatagccctgcacatcaaactgcttgagcttcgccgggtcgttgatgcgttcctcgatcacaaagcggctcatcatcccccgggcttttttggcgtagaagctgatgatcttgtactggccgttcttcaggtccttgaactcggtgttgatgatccgcgccttcaaggccgtacgcttgaccgccgagaagtattcgttggaggccaggtttagcagcacgtcgtcgccttgttcggccagcgcttggttgagccactcactgatacgcgtgccccagaaggcgtacaggtccttgccacgggcattgggcagcttggtgcccatttccaggcggtacggcatcatcaggtccagggggcgcagcaggccatacaggcccgagagcatgcgcaggtggtcctgggcgtagctgaagtcggcatcgctgaaggtctctgcattcaggccggtgtacacgtcgcccttgaacgccagcaacgcctgcttggcgttttcctgtgtgaacgcaggcgtccagctgccgaagcgggcggcgttgaggccgccgattttgtcggacacgtgcatcagttcgctgatttgcgccgggctcaactcgcgcagttgctcgatcagctcttgagagtggtcaaggtattgcggttgggtgtagcgcggggttaccggctttgactcgaaatcgagggtcttggcgggggaaatcaccatcagcatgaagtcgtctcctgtaaacgtggggggattctaggggttggggcgttttgactccacctatgatggcgataggcgcgatccgctatgatggccggtgactctggagagggagaccctgtgtgcgaatagcgcttttgttgtcggcatgcctgctatgcctgaatgcccaggccgcgccggtggatgtggtcagcctggaccgtggcacctggcccgaaaaactcggcagcccggcgctgttcgatgtggcttcacgcgccgaaatcctgatgttcgcccacagcctgctggccagcgagaaccaggacgaaaccgcgctcaagcaacgcctgggcctgaagatcatcaacctggccgccatcgacgacctgcgccgccaactctggcagcgcctgctggagaactacaccttcgcccagcagagctgtgaggaagacgcgtcgttctgctatctggtggaaaacatggatgacctgcgcgagcaggcgggcaagttcgaggtcggcgaaaactctttctatataggctgggccggtccgagccatattttccatgagcgctacctggatgaactgctgcgcaaggcggcgctgtttccgcagatcagcagcgaaatcgcgcgtttcggcgaccatgagcgcaatggcgacgagttcaacgatcgcctgttcctgctgacgttcgatggcggcccggcccccgtcagcggcaataccgactggctcgccgactacctgcgcaagcaaaagatgaacgcgaccttcttcgccctcggcagcagcctgcaaacccgggtcgagcgcagctcggttgccgatgtgcaggcgctgtaccagggccagtgtgttggcacccagggttggcagtaccgttcccacagccattgggtggactggcagagttcgatcacccgcagcgcgtcgttggcgcagaacctgatgccggaaaactacgtgccgctgttccgtccgccctatggccagcgccgcgcggacagccagggtttctttcaagcccagggcttgcaggtagcgttgtgggatatcgactcccaggacgaaccgggcaagctcaaggccgatgagtcggcgcaacgggtgctgaccttgatgctgttgtggcgcaaaggcgtgattgtgttccacgacacccaggacaaggcacgggtcgctttgcccatgctgttgcaggcgacggcgcagagtggtctgggttggcaggactgccgggaggcgtttcgctgaagtgcccggaactgttgggttttgggcgatttcggggtgattttgtgcgatatttcgatgcaggcggacttccgactttagcggggtatgtggcactcggctagtgctattcgtcatcctgaaaaataaacttcaaaaaagcgtcaaagtgctttttcctgtcacacgttttgcggtattacgaagtcagatcgccgaaacctgcaacacaggtggcgtcttccaagactcctcatgtgggcactgcgcttgacgtcactcaggtgcagtcggtggtcgaatcgaggcgcagcaccgcccaggtattgcgtcgactggctcccacaaaggtgaccgagtatggatgatcatggacgtaacccttcttccgaccagccaatcctttatgtgcttgataccaacgtattgatccacgatccaaacgcactgctcaacttcgaagaacaccacgtcgccatcccgatgatcgtgcttgaggagctcgacaaactcaaaagcggacaccacagcgtggccgccgaatgccgccaggccatccgcctgatcgacaagacattgggcgaagcctcgccggaagatgttgaagtcggcgtgccgatccagcgcggcaaaagcggacccaagggcttgctgtcgattctgatgagcaagcgcagcgagcccaacagcctgctgccggagaacctgaacgacaacaagatcatcaaccaattgatcgacctgcacgcccgcgacaaggacctgcgcgtggtgctggtgaccaaagacatcaatatgcgcctcaaggcccgagcgtgtgggatcgcggccgaggactacagtaccgaccaactggtcgacgacgtgtcgatgctgtcccgtggttatcacatgatgactggctcgttctgggaccgcgtcagcaaggtcgaaacccgtcaggaccatggccgtacctggcaccaggtgcagctgatcgataacctgccggccgtacatatcaatgagttcatcgtcgacgaacagggcttcgtgggctggatcaaagagatccaggtcgacaagctgctgatcctcgacctgcatcaggaacccctgttgcaccaggaagcctggggcctgaaaccgcgtgatatctaccagagcctggcgctgtacgcgctgctcgacccggacatccacctggtcaacctgaccggcgccgcaggctcggggaaaaccatcctcgccctggctgccgccatcgagcagaccatggtgaccaagcgctatcgtcgtatcatcgccacccgcagcgtgcagggcctggaccaggagatcggtttcctgcccggtaccgaagcggaaaaaatggagccgtggctgggggcgatcaccgacaacctcgaagccttgcacatggatgatgaaaacacccatggcagcgtcgactatatcctcagcaaagtgccgttgcagttcaaatccctcaactacatccgaggtcgcagcttccagcagagcctgatcctgatcgatgaatgccagaacctcacgccgcaccagatgaaaaccatcatcacccgtgccggcgccggttccaaagtggtgtgcctgggcaacctggcacagatcgacaccccttacctgtccgcgaccagctccgggctgacgtacctgactgaacgcttcaaagacttcccgaacggcgtgcacattgcgctgcagggtgttccacgttcgatcctggccgaatacgccgaatcccatctctgaccgtcagcacctactaaaacgggcgccccatgggacgcccgttttttgtgttcaggccgaccgctcgaccagcgcccaatcgatcgccggtttgtgtgccctggacagcagggtgtacaccgacggcaggacaaacaaggtaaacagcgtgcccaccagcatgccgatcacgatcaccagccccaacccaaagcggctgctggcaccggcacccgacgagaacagcatcggcaccaggcccaccaccatggccgccgtggtcatcaggatcggccgcagccgaatgcgtgccgcccgcatgatcgcctgggccggcgtgcagcggtacagcacctgcagctcgttggcgaactcgaccatcaggatcccgtgcttgctgatcagaccgatcagggtgacgaggccgatctgcgtgtagatattgatggtcgccagccccagcgccaggggaatcaacgcgccgcagatcgacagcggcaccgtgatcagaatgatcagcgggtcggtcaggctttcatactgcgcggccagcaccatgtagatcacgatcagcgcaaacaggaaggtcagcatcagcgcattgccctcgtggatgaactgccgcgaatcggcctgccagtcatggctgaaactggcgggtaactggcggctctgttcctgcaagaaagccactgcctggccgaggctgacgccgggtgccggaataccctggaaggtcgcgctgttctgctggttgaactgcttgagcttgttcggctcgatcacgttgtgcagcctcaccacggtggacagcggcacctgctggccggtgtcggtgtcgacgtagaagccattcaggtcctggggcgtgaggcgccgcgaggcctggctctgggggatcacatcgtaggagcggccttgcagggcgaaccggttggtgtagttctcaccgatcaacaccgccagggtactgccgatgtcctgcatgcgaatccccaggctgttggccttgctgcggtcgatgcgcacttgggtcaccgggttattgaacgccaggtcactgtcgaccaccgcaaacagcccgctggcccgcgcctgggttttcagcgcctccatggcctggtacagcgaacggtagtcttctgtactgcgcatcaccatttgcaccggcaaaccaccggtggaggcgggcagtggcggcaactgaaacacgaagatcgagttgccttccacggcgtcgacactttgttgcagctcggcctggatcgtcgcggcgctgcgctggcgctgcgaccattcggtgaagttcaccccggcaaaactggcggcgacgccgtcattgccgttgatgatccaggtgctcacggtctccggcaagtggccgagaatcccgctcaactgataggcgtagcgctctacataatccaggttggcgtgctgtggtgacttgatcgccagcagcaggttgccctggtcttcgttgggcgccaactccttgctcgcattgccatacagccagggcaggctgagcagcaccaaggcgccgaacaacaggatcagcccgcgcttgcgcagcgaacccagcaatgcgcgctgatacaggcgtgccaggcggtggaagaagcgctcggccaggcggctcatggtgccttcgtgctcctggccaggtagcagtttggcgcacatgaccggggtcagggtcagggcgattaccccggagaccagcacggcgccggccagggtcagggcgaactccttgaacagcgcgcctgtcaggccgttcatcaggccgatgggcatgtacaccgccgccagggtgatggtcatggcgatcaccggcgaagcgatctcgcgcgcgccgaacaaggcagcctgcagcgcgctgcggccttccttgacatgccggtggatgttctccatcaccacaatggcgtcatccaccaccaggccgatcgccaacaccatcgcgagcaacgtcagcaggttgatgctgaagccgaataacgtcatcaaacccagggcgccgagcatcgacaacggaatgctgacgatggggatgattacgctgcgcaccgagcccaggcacaggtagatgatcaccaccacgatcaggatggcctcgatcagcgtttcgatcacttcgataatcgaggcttcgataaagtgcgcggtctcgaacgccagggccaccttgacccctggcggcagggttttctcgatgttcggcaacaggcgcttgatgtcggcgacgatcaacagcgggttgcccttgggggtcgcatagaggcccaagtgcaccgcgggcttggcgtccatcagcgcactggtttcataggccgccgaacccagttcgacggtcgcgatatcgcgcaggcgcagcaggtggtcgccgttgttgcggatgaccatgttgcgaaactcatcgaggctgctcaggtcggtgttgacctgaatcgaggagatcacatagtggcctttgatctgccccggcgctgcctggaagttgttgttgcggatcgcctgttccacctgggcggcactgatgccgtggcctgccatgcgttgcgggtcgagccacaggcgcatggccaggcgctggccgccgaaggtctcgaccttggccacgccgtcgatcgtggaaaacaacggctgcaccacgcggctcaggtaatcgctcaaggccgaggccgacagcgaatcactggaaaaccccacgtacgccaccgctgtcgcatcgccggcggaacgttcgatcaccggatcataggcctgttcaggcaggcggtatttgacctggttgaccttggcaatcacatcgctcaacgccttggccgagtcctggttgagtgccatgcgcagggtgatctggctgcggccctgcaccgatgaggaactgacatagtccacgccttccaccgaggccagggactggttgatcggttgggttacgaagccttgcatcagctcggcgggggcgccggggtagtcggtggtcacgctgatcaccgagctttccaacagcgggtattggcgcacaggcaggtcgaggtaggccttgagcccggccagtacgatcagcaggctgaccaccagggccagtaccgggcgacgtacgaacaggtcggtgaatttcacgggttttctccggccatggtcatccccgaggacgggtcggcatcgttcaacaccgtacgttcgaggggctcgatagcggcaccgtcactgagcttgatctgcccggaaatcaccacgcggtcacccggattcaggcccgcatcgatcaccacgcggccattgcgccgctcgctggtcttgaccaatacgcggcggacgacgggtggggtattggcatcggtcgatggctgcaccacgaagacatcttcgccgtaggcgttataggtgatggcggtttccggcacgctcaaggtgttgccgggcaatgactgtggcaggcgcactttggcgaacatgcgcggcaaggcgccgtcggtgggggcctgcagtagcgcctggacactcagggtgcgtgagcggtcgaggaacgggtcgatactgctgatgcgtgcgctgaagctttgcctcggcagggcgtcgagttgtacatccagggtattgccgaccttcagttgtgccagggcttgctccggcacgctgaagtttacgtacaggcccttgtcgccgaccaggttgatcaggctgtcgccggggttcacaaattggcccaggtgaaccttgcgaatcccgagggtgccagcgaacggtgcacgaatggtcaattggtcgatctgcgccttgagctcctgcagggcgccttgagcggtggtgtattcggtctgggcattgtcgaaggcttcgcgagacgtggcgttcaccttgaccagggtgcgcgagcgttccagcttgaccttggcattttccaactcaccctgcaggcgcatcaggttgccgcgttggggcgcatcgttgagcctgaccagcacttggtcgcgctcgacgcgctgcccggattccactggcaactgcaccacacgcccgccgacttcagccggtacgctcacctgctgcacggcttccagctcaccgatggcttccagatagcgggtgaacggtgcgtcgctgaccggcgccaccgccactttgatcggcgcgggcgcgtaggcagcggcagccggatggctccagcgccacaatgcccacgccaatgcaataaggatgaccacggcaatcgacaacgccacggtggttcgtgagacggcacgtccggatcgactgacgtgtgacataagcttcattccttgatggcaatcagtagatgggccagcagcccggcgtcagtagttcgacgaggttctcatccggatcgcggaaatagatgctcgatccacccttgggccagtgggtgcgcccctcaatggcaatatctgcgttgtccaggcgcgcctcccaggtcggcaggtcgtcggcgtcgatggcaaagcagatatgaatgcgcccgttggcgtcatggggcgggatctcgccgccgctcaagtatttggtttgaagagaggcgccccgtttgaagagcaagagggtattctgctggccgacgtttaacgcgacgagtacgttgctctcgaccatcgtctcaagctccaggtgctgggcgtaaaacgctttggcgcggtcgaggtcgtctacgtacagcgcggtctcaatgattcgtttgagttgaggcatggttttgctccttgttgaaggttgctccctgagatggaattcacagcatggtcacggtcctactgcgcaatatcgatttgaatctgttggtggtgctcgatgcactgctgactgaaaaacacgtcacccgcaccggtgcacgactgcatttgagccagccggccatcagtcattccttgagtaaattgcgggtgctgctcgacgatccgatcctgatccgcgagggtaacgaagtggggctcagcgccctggcgcagaatatccaggtgccgttgcgcgacatcctcagccagatcgaaacactgttcggcaagtccatcgacttcgacgcggccagttcccaacgcacctttcaattggcgatgtcggactacggtgcggcgattatcctgcccaagttgctggtgcgactgcgcagcgaggcgccgaacaccacgctggtggtgacccagggcagccggcatgcgatgttcgagcaagtggcgcagggcaagatcgacctggccctgggggtgttccccagcctgacgcccgatgtgtcgatggaagtgttgttcgaggaaacgttttcctgcctgctcgaccggcggaccctgtccaaggacggcatgctcgatctggagagctacctggatcgtccgcatatccaggtgtccatggatggtggtgccaatggtgaagtagacagtctgttgcgtgccgaaggcttgcgccgtcgtatcgctgtcagcgtgccgcactggcgtacggcgccgagcctgttgcacaacaccgacctgatccttaccgtcgccacccgcacgctggaagacacgttgctcaacccggacctggtgcagttgccgccaccgttcagcattccgcgctttccctttgtgcagatctggcaccagcgattctgtgacgatccggcacatgcgtggttgcgcgaacaggtcaagcaagtggtggctcataccgtgcaggtcgactgatcggggcgcaggcgtaaccgcaagtcctggcccaactgggtcacttcgtacagggtgaagtccagggaatgggtgaggttttccagctccggtaaatgcaccagcggccgtgcgaggtcaccgagcaggcgcggcgcgacgtacagcaacagctcatccaccagcccggcgcgcagcaggttgccggccagggtcggcccggcttcgaccatcacatcatgcaaaccgcgcaggctcagatggaccatcaaggcatgcagatcgagaccactctggttgcccggcaggccgagcaagcgctcagtgttggcgcctggcggcagatgttgctcgtgcaccacatgcaggcttggcgcctggtcgtcgaacaccttcgcggtatcgggcacccgcgcctggctgtcgaggatcacccgcagcggcgcgatggcttcggcagacgccatctcacgtacggtcaatgaggggttgtcggccagcaccgtgccgctgccggtgaggatcgccgcactgcgcgctcgccaatactgcacatcggcccgcgccctggcgccggtgatccattgcgagcgcccgttgttcagcgcggtgcggccatccaggctcatgcccatcttcaactgcacccacggccgatgacgcttgaccgaggacaagaagccacggttcaactcgcgggcggccgcattgagcaagcccacgcgcacctcgatcccggcgtcgcgcagttcggcgatcccacgaccgtcgacctgctcgaatggatcttcgtgggcgacgaccacacatgccacgccagcctcgatcagcgccaggtgacaggcgccggtgcgcccgacatggctgcagggttccagcgtcacataggccgtggcgcccttggccagggcaccggcctggcgcagggcgaagacctcggcgtgcggaccgcccgcacgccgatgccagccttcgcccacgatgtgtgcaccgtgggcgatgacgcacccgacccgtggattgggccaggtggagtgactgccgcgctcggccaacgacaatgcatggtgcatatgttgaaagtcgatttcgctgaagtgggtcatgggcggcgttgccctgccacagcgtgggcggtgatcgggtagatacgcccgtcgtaggcgctggccaggaagccactgccttcggcgtcatgggtcaggcatgaaataccgctggcggtgatcttctccacctttgcccatttgcgcttggccaggtcgaacacggccacggtgccgccgtagctgccggtggcgatcatctggcggtccttggagatggcaatgcacttgatcgagtggctgtgaggggtgtcatacacctcgctgttgccggcttgccacaggcgcagcttgaggtcgcgaccgatactggcaaagccgccctggatctgcgtgcagccgttggaaatacggtcgtgggccttgtccaggtaggtttccagttcgaagtcgctgatccggaagaacgccgcggccgctgtcgcgcatacgctgaacaggtactgttcatcggcggcgatgcccttgatggcgttctcgtgcatgcgcacttcgcgcaggaaacgcggctgctggtgttccaggttgaagatcaaggcttcgccagtgtacgtacctattgcggcgtgcaacttgccatctttttcaaaggtggtgccgcagttgagcggtgagcggtgctggtagatgacgtcgccggtcttggcgtcgaacaccgtgcccatctggccgccggtcaacacgctgtcgccgaagggcagcaggaagttgcacaggctgccggccttggtgctgggctggccattgatctgcaggatgccggcatcaccgatgctgtagatgtcgtcgccgaccacggtgactgcgttcaaactgatggccggctcgatgccgcccacgtcccattcctgagtggtgaaatcccaggtggcgtaggttgagccgaaggtcacgaaggcgatgcgatggttgcccagcaatgcacagctgcgtggccagatgatgcttggcagtgaagtctgggcggtttttaccagttggttatcgggcgtcaactcccacagcatgacgcaacggtcgtagctgaggctgaccagcaggcgctgcgcgtcgttccatacgatgcgcttgatgcccgcggcatgggcagcttgcaggtaggtgccgctgctgctgatcacggagattttgccttcgtcgtcaccggcgaaaatgatgccctcacgggacagggccaccgtgtcggtttcgacgccgcccaggtcgatcaggtccagttgttcgccgctggcagcgtcccaacggcggatcgaaccgtcatcgctgctggacaccagggtcttgccatcggcggcccagcacaccgaaatcacgtcggcatcgtgaccgctgaggatccgcagggttcgcccgctgaggtcgaacaggcggatgctgtggtcccgcgagcaggtggcgatggtctggccatccggcgagaaggcggccatttcgatgtcgtcatcgtgacccaccagcacgcttttcaagcgcagcgagggaatttcccagacgcgggcggtgtagtcgctgctggcactgaccagcagggtgccgctggcgttgaacgcgcattggttggccaggtggtcgtggagcacacgctggatcggcgtcttggtttttgcatcccacaaaataacctggttgtcataaccggcggtcgcaacgtacgtatcgttgaatgttgcaataccactaatagggccaaagtgtctcatgcgtcatcatccttaatgtagtgtgggcggaagaaagtgtcaggcgcgcttcggttgtttcatcaggttgatcacgtgatttttcttatcgactttcgcttgcaggtaatgagtgttatgtcgagtgacaaacacacctgtcggaataacgttgtccactacaatgccgttatccaccagggcctgaactttgtccgggttattggtgatcaattggcactgtttgatgttcagcgcttttaacatgccagcggccatggaaaagtcgcggtcatcttcaggaaagttcagatgggtattggcttcgaacgtgtccatgccagaatcttgcaggcggtaggcgtccaactttgcatataagccgatgccgcggccttcttgccgcaggtagataagatagccacccacttcctgcatgcgcaggatcgactcgtttaattgcgggccgcagtcacagcgctgtgaactgaatacatcgccggtcaggcattcggagtgaatacgcaccaacgggctgatgggattggcggggccaagctttatcacgatatgttcgtgtgccgtgtccaacccactgaacgtgtagaaagttccagggttggaatggtcgtccagggggatatcaacatggttgcgtacgcttaggcggttcatggcggttccttccgtgcttgaatgttcaacgcgttattgttttggtacggggaggggttacagggtttgtgcgaggcgaaagcccattacgtaaatctgtcgcggatacttgccgtgacgccggcaattgcgggtcaggtcgcgaaaccgcgtgaagctgccaccacgggcgatgcggtgggtgccgaccacagtgacgaggtcgtcggtgatggcggtgccgccggggtagggggcgtagtcgtcagcgacgaattcttcgacattgccggccatgtccaggcagccaaatggcgacgcaccctcgaccagaaggccgaccggggtggtgtcgaacaggcccagttcagcggtgttggcacgctcgggcaggaaggtatccccccagggatattcgaggttttccgggccggcggcggcgtattcccattccgcctcagtgggcaggcggaagctgcggccactggcttcgctgagccaggcagcgtaggcgtcggcgtcttcggcagtgaccccgtagaccggatggttggcgcgttcgtgagggtactgtccgaaggcccagctttcgggaatccgtgcctgcgtgttggcttcgagaaaggctcggtattcgaggttggtcaccgggtatttaccgatggcgtagggccgcaggtgtacgcggtgacgagggacttccttggcgatccagtcccgatccaggcccaggccgcgcatgtcgtgcatcacttggtcgaccgccgattcggccaaaccgatctcgacggtgcctgcgctgatttgaatcatcgtagggttgagtacatcgagcctggggtcgttggtcagtgccagcagttgggcggcggcatagcgccaggccagcggcgagacagggttttcgacgcggttggccaactgttcgctggtctcttccgaaaccaggcgccaggctgccagcggcaacttgagattgacggcttcgtggaagtgctcaggcaggcccatcaagaaacggtctgtcatttcggcggtcagggggccgtcgaacacgggccaatggttgaaacccttggaagtcataacgctcgttttcctactgcgtgggagaaaaggcacgtacacccaggcgcacgtacccggccttcagagggtgcagatcagtccggtttgcaggcagttgcgttcgaagtcatcccagtagcccttggggtgcttggcccgctcggcctcggaaataatcggtttttgccactgcaggcgggagaagccggctttcatgattgccagctcatagcgctcgcggctccagcgatggaaggtgaaggcgctgggcggtgtggtgacgaattcggcgtggtgacggaagccgccttcgtggggttcttcggtgagtacgtgcacgccgtatttggtgaagttgccacgtttcaattgaaaggttggctctaccgtgtaagccacgacccgtccgccgggggcgaggttcttggcgacgacttggaacatcttgtcgagtttttctggcgaatcggcgtagttgaacagccaggcggcggtgatcaggtcgaatttgccgagaatgcccagatcgcagatatcgctgacgtggtactcgatcggctcctggttgcgcgccgactcttggcgggccaggtcaatcatggaggcggaaatatccacgccaaccactttgctggcaccttggcgatacagctcgcgtccgaaaaaaccgaagccgcaggccaggtccagtacggatttgcccttgggattaccgaccatgctgaagaaggtcgcggtttccaccgagcgctgcgaggcgctgtccgtgaaagcttcgaagcgttcgccgatggcgtcgtaagttgccgttgcagtttgagtggtcattgcctcacctttttaaagttaatagctgtcgtcaatccctgactgggagcatgaagagttcttctgttttcggtgaccctgttttgtctgaatcaagtgcgagtggtaataaggaaccctcctatgacgacaagtacgccgaccagtttgttaatgttgagagactgtttggggaaacccagcaggccgaaatagtcaatcgcaattgaaacgataagttgtccgatcaataccgccatgatgaagttgagggcgccgagtcgaggcgccatcaataacgctacggtaatataaaaaacgccggcaacaccgcccatccaaatccaccagggcccgtcttgcacggcggcaagattagggcgaggcgccttgactgcaataatgacaacaatgagtacaaccaggctgaccaatagggatactgcagtggcccataaaggatgacctagcagattacccagtttcgcgttggtgcctgcctgcaagggcactgcaaaaccggcgaataaactgagcaggatgaaatacagtaaggtcatgaagtaggcattccgttttttttcaagttttacggtgcttggattgttggcgccaattctttgttctgatggggagtattcgtcgcactgatcgggcatttggctactcgtgattcagcggcgggctacgggtgtaatcaggtgtgcgcaatcttgaccgacgggtttacaatcgctgctcctgatcaggagtatccctgtgctgactcatctcgattcccaaggtcgcgcccatatggtcgacgtcaccgacaagtccgtgacgttccgtgaggccgtggccgaagcgcgcgtgcgcatgctgcccgagaccctgaaaatgattgtcgacggcgcccaccccaagggcgacgtgtttgcggtggcccgcattgccgggatccaggcggcgaaaaaaaccagtgacctgattcccctctgccacccgttgatgttgacgggcgtcaaggtcgaactgagcgccgacggtgcagactcggtgcatatcgtggcgcgctgcaaactctccggccagaccggcgtggagatggaagccctcaccgccgccagcgtcgcggcgctgacgatctacgacatgtgcaaggcggtggaccgtggcatgaccatcgaaagcattcgtctgctggaaaaactcggcggcaaaagcgggcatttcaaggcggaccaggcatgagcatcaacgtattattttttgcacgttacgcagaagctgtgggctttgattcgctggagatggagggcgagttcgccaccgttgatgctgtgcgcctcgcgttggccagtgacccggagtttgcagtactcaacgagaccagcctgatgtgcgcgcgcaacgaagagttgtgtggtctcgatgagccggtgcaggcgggtgacgaagtggcgttcttcccccctgtgactggaggctgagcatggccattcgtgtacaggcccaggcctttgatccaggcagcgaggtgaatgccatgcacgcggccaacgttggcgtgggcgcggtggtgagtttcgtggggtatgtacgcgacttcaacgacggccgtgaggtgtcggggatgttccttgaacactactccggcatgaccgagaaggccctggccaagatcgccgtcgaggctgaacagcgctggccgttgctcaagctggaggtgttgcaccgcatcggcgcgctggagccgggtgagccgattgtgttcgtggcggcagccagtgcccatcgccaggcggcgtttgatgcctgtgcgtttgtgatggactacctgaagacgcgggcgccgttctggaagaaggagaacaccagtgaggggccgcgttgggtggaagggcgtcacagcgatcacgccgccgcagatcgctggaagtcttaggccaaacacagcaccaaatgtgggagggggcttgcccccgattgcagtgggtcagccaacagagatgttagatgtgccatagctatcgggggcaagccccctcccacagtttttactgcattccagcttacggacgcttgcgttccacggcgcgcaacaggtgcgtcggcggcgtctcgcaactgatcttgcgccctagcagcgcttcgatcgacggcaactgatacgagtcatcttccccggcaaagctgatcgacacacccgccgccccggcacggccggtacggccaatgcggtgcacgtagtcatccggcacttccggcagggtgaagttgatcacgtggctgatgccgtcgatgtgaatcccgcgtcccgccacgtcggtggccaccagcacacggatcttgccttcgcggaagccttccagggtcttgatacgcttgtgctgtggcacgtcgccggacagttgcgcggcgttcacaccatcacgcaccaggcgttcttcgatgcggcgcacctcgtccttgcggttggcgaacaccatcacgcgctcccagccgttgtcgttgaccaggttgtagagcagcttgtacttgtcggcgccagccaccgcgtagatgtgttgctcgacgttttcgctggcgacgttttccgcttcgatctcgacgatggacgggtcggtagtccactgcttggcgaggttcatcacgtcttcggtgaaggtcgcggagaacagcagggtctgacgctcggatttcggcggggtctggcgaatgatctggcgcacttgcgggataaagcccatgtcgagcatgcggtcggcttcgtccagcaccatcacttcgaccatgtccaggtgcacgtcgccgcgctggttgaagtccagcagacggccaggggtggccaccaggatgtcgcagtgacgagcttcgaggtgcttgagctgcttgtcgaagtccatgccgcccacgaacgtcatgacgttgaggccggtgtacttggtcaggtcggcggcgtccttggcgatctgtaccaccagctcccgggtcggggcgatgatcagcgcgcgcggttcacccatgtagcgctctttgggcggcggcgtctgcagcagttgggtgatgatcgagatcaggaacgcggcggtcttgccggtgccggtctgggcgcggccgatggcgtctttgccggccagggtgaagcccagcacctgcgcctggatcggcgtgcaatacgggaaccccaggtcctggatggcgtgcatcagttccggggccagcttgaaatcatggaaacgggtcttgccttcctggggctcgacgacgaagtcttcgagtttccacgcaatcaccggcggttttggcgcacgttcacggcgcggttttggtgccaccggtgcggcaacgggctcgactggcctggcctgttcggctggggtcaccgtcggcttcttcggctgggcggcaggtgcggtccggtcgggctgtctgccgtcattgcggctgccggctgtcggggcaggagcactggaatctggcgcgagcggctcagcctcgcttttgccgaacatcttcttgagtgctttgagcacggtgatctcattaattggttaaggaatgtacgccggccagtgtaatgcaagaatcgggcgcggcgtagtgcgtctgtcatacagctacataaacgctggttttcagcccaggcgagcggtcaaccaggcaccgatgtcgcgtatctcctcgggtaacacttcgtggcccattgggtattcctgccatgtcacggtgacaccacggctcttcagatgctcgtaggcgctgcggcccatggcgttctgcaccacatcgtcgtattggccgtgcaggcacagtgcgggaatgcgctgctggctggcggataattccagctcgtcgctgaacgtgggcgcgtaggtggagagggcaatcacgccgcccaaggggccttcccaattcaggaaggcggtgtggaacaccacggcgccaccttgggaaaaaccggcgaggaaaatccgcgaagcgtctattccggttctcttctgtgtctcgatcaggtccgtgaccatttttgccgacacttccagctcttccaggctgatggaacgggccgggctcatggccttgatgtcgtaccagcttggcatctcgtagccaccattgatcgtcaccgggcgggtcggcgcctggggcaaaacgaaacgcgtggtcagcaggctttcctgcagcgcctcggccaccggcaggaagtcgtagcgatcggcacccaggccatgcaaccagataacgcaggcgtctgcgggcttggcgggctgaagaatcaagggttcggtcatgtctgctccattaatgtgcgtgcgctccgattaagtgcgacggaacggtgcgcgatgggttgatctgttaagaagatgtcgcacggttgaatctttttctattgaccatgggctgaaacgactcagccatcactctggtacggggcttgctatgtgttgaacgatgtcagcgctatcccgggacggtaacactatcagtgactgccgcttatgggatagcaactggaattactgcgacaacttcatgccgcttgaccctaaaaaaagccaacacgggtcgatatcgcctcataagggtgcgctgaggttcgagctccgacacaacaagagcaaactggaggtttgaatgaaggtattgaaatccaccctggccatcgtgaccgcggcggctgtattgggtgtcagtggtttcgcccaagcgggtgccacgctggacgccgtgcagaagaaaggctttgtgcagtgtggcgtgagtgacggcctgccgggtttctcggtaccggatgccagcggcaagatcctcgggatcgatgctgacgtttgccgcgctgtggccgctgctgttttcggcgatgcgaccaaggtcaaattcagccagttgaatgccaaggagcgtttcaccgcgcttcaatccggcgaagtcgacattctgtcccgtaacaccaccatgaccagctcccgcgatgccggcatgggcctgaaattcccgggcttcatcacctactacgacggcatcggcttcctggtaaacaacaagctgggcgtgaaaagtgccaaggaactggacggtgcaaccatctgcatccaggccggtaccaccaccgagctgaacgtttccgactacttccgtggcaacggcctgaaatacaccccgatcaccttcgacacttccgacgaaagcgccaagtcgctggagtccgggcgttgcgacgtactgacctccgacaagtcccagctgtttgcccagcgcagcaagctggcctcgccgaaggactacgtggtgctgccggaaaccatttccaaggagccactgggcccggtcgtgcgtaatggcgacgacgagtggctggccatcgtgcgctgggttggctacgccatgctcaacgctgaagaagccggcatcacctccaaaaacgtcgaagctgaagccaagtccaccaagaacccggacgttgcgcgtctgctcggtgctgacggcgaatacggcaaagacctgaaagtgaagaaagactgggttgtacagatcgtcaagcaagtcggtaactacggtgaagtgttcgagcgcaacctgggcaagagcaccccgctggaaatcgaccgtggcctgaacgcgctgtggaacgccggcggcattcaatacgcaccacctgtgcgctgatcgctgatggttctgtcacccggtgggccaaccgccgggtgatgttctgttccattatttccggggcacttcatgcaaaatcaaatcggcgcacccaagcagaagctcagcttcagcgaccctaaagtgcgtgcgtggctcttccagatcatcacgatagtggcggtggtctcgctgggctggtacctcttcaacaatacccagaccaaccttcagcaccggggcattacctcgggtttcgactttcttgaacgcagtgccggcttcggcatcgcgcagcatttgatcgactacaccgaatcggacagctatgcccgagtcttcgtgatcggtttgctcaacactttgctggtcacttttatcggcgtgatcctggcgaccttgctggggttcatcatcggtgtagcgcggctgtcaccgaactggatgatcaacaagctggcgaccgtgtatgtggaagtgttccgcaacattccgccgctgctgcaaatcctgttctggtacttcgcggtgttcctgaccatgccggggccgcgtaacagccataacttcggcgacaccttctttgtcagcagccgtggcctgaacatgccggcagcgattgccgctgacgggttctggccgtttgtggtcagcatcgtcgtcgccatcgtggcaatcgtgctgatggcgcgttgggccaacaagcgttttgaagccaccggcgtaccgttccacaagttctgggcgggcctggcgctgttcatcgtgatcccggcgttgtgcgccttgatcttcggtgcaccactgcactgggaaatgcccaagttgcaaggcttcaactttgtcggcggctgggtactcatccccgaactgctggcactgaccctggcgctgaccgtctacaccgcggcttttatcgccgagatcgtgcggtcgggcatcaagtccgtcagccacggccagaccgaagccgcgcgctccctgggcctgcgccccgggccgacgctgcgcaaggtcatcatcccgcaggcgctgcgggtgatcatcccgccgctgaccagccaatacctgaacctggcgaaaaactcgtccctggccgccggtatcggttacccggaaatggtttcgctgtttgccggtacggtgctcaaccagaccggccaggccatcgaagtcattgccatcaccatgagcgtgtacctggcgatcagcatcagcatttccctgctgatgaactggtacaacaagcgcattgcgctgatcgagcggtgaggaaacgcccatgagtacgcatacgttcaaacctgatatgccgccgccgaacaaagtgttcgggccgatggcatggatgcgcgccaacctgttttccagctggctcaacaccctgctgaccctgttggcgttttacctgatctacctggtggtgccgccgatcctgcattgggcgatcctggatgccaactgggtcggcaccacgcgggccgattgcaccaaggagggcgcctgctgggtgtttatccaacagcgcttcgggcagttcatgtacggctactaccccggcgacctgcgctggcgcgtggacctgaccgtgtggctggccatcgttggcgtagcgccgctgttcatctcgcgtttccaacgcaaggcgatctacggcctgagctttttggtgctgtacccgatcatcgcctacttcctgttgcatggcggcatcttcggcctgaccaacgtggcgaccagccaatggggcgggctgatgctgaccctggtgatcgccaccgtcggcatcgccggtgccttgccgctgggcatcatgttggcgttggggcggcgctcgaacatgccggcgattcgggtggtctgcgtgaccttcatcgaattctggcgcggcgtgccgttgatcaccgtgctgttcatgtcctcggtgatgctgccgttgttcctgcccgaaggcatgggcatcgacaagctgctgcgggcgttgatcggcgtgatcctgttccagtcggcctacgtggccgaggtggtgcgcggtggcttgcaggcgattcccaaaggtcagtatgaagcggccgcagcgatgggcctgggttactggcgcagcatgggcctggtgattctgccgcaagccctgaagctggtgattcctggcatcgtcaacacgttcatcgcgctgttcaaggacaccagccttgtgatcatcatcggcctgttcgacctgctcaacagcgtcaagcaagccgccgctgacccgaaatggttgggcatggcgaccgaaggctacgtgtttgcggccctggtgttctggattttctgttttggtatgtcgcgctattccattcatttggaacacaagctcgacacaggccacaagcgttaggagttgttgttatgagcgaagcgatcaaacagcctgtgagccctgaaggcattatccagatgcagggcgtcaacaagtggtacggccagttccacgtgttgaaagacatcaacctcaacgtcaagcagggcgagcgtatcgtgctgtgcggcccgtctggttcgggcaagtccaccaccatccgatgcctcaatcgcctggaagagcaccagcagggccgcatcgtggtcgatggcgtggagctgaccaacgacctcaagcagatcgaagcgatccgccgcgaagtcggcatggtgttccagcatttcaacctgttcccgcacctgaccatcctgcaaaactgcacgctggcgccaatgtgggtgcgcaagatgcccaagcgcaaggccgaggaaatcgccatgcactacctggagcgcgtgcgcattccggagcaggcgcacaagtttccggggcaactgtccggcggccagcaacagcgcgtggcgattgcccgtgcgctgtgcatgaagcctaaaatcatgctgttcgacgagccgacttcggcactcgacccggagatggtgaaagaggtcctggacaccatgatcggcctggccgaagacggcatgaccatgttgtgcgtgacccacgaaatgggctttgcgcgcaccgtggccaaccgggtgatcttcatggacaagggcgagatcgtggaacaggcggcgccgaatgacttcttcgacaacccgcagaatgatcggaccaagctgttcctgagccagatcttgcattgatcgatgcttgaaacgataaacccggcctggcgccgggtttatttttggggctaggacgctttgagcgtttcagcgttatcgtgtttgatgtaggtgaacgcgccgcgcatgtctgcaccctcggccagggtttttgcgtcagccagcaaatgcgggtgacgatccagcaagcgcatcagtaataccaggggtttgggggcaagcagttcgccgcgttcgtagcgtgagaacgcgttgtggccgcctcccgacagcagttcgacggcctctttttgcgtaagatgcagcttgcgtcggatgcgttttatctcggcgccgatgatttgtcggaaggcaaggatcaattcttccttggctttgccgtagcggtctgcactgtcgttttctgggtcccagaatccgtcaccacacacctcacactcccagcctgaaagattgtcgatccgacgctccatatctttgactctgattgtttcgctgcggccctggtaataactcaatgcatcgggggccccgcagatgcagcacagctctttctttttcatgggttttctccttgaaggagatcaccggaggtctaccgtctgtgcggtaagtgcccttgatgtaaatctccctacctttcgagtgggtgtggtacacgtcctgccatactcgatggtctccataagtggtcatcgacttgtacagcatccagtttcgcaactcataaataacgtcctgcatttcctcgatgccaaatccaagacgctcgccacattcctctgctgtccgggtgaatgctttccttcccaaccgcctcacatccgcctttatcaccgccaaatcgtaatgaggtgtgtacttttccataagacacctgagttcataattaccctcagagggtaatttcaccaatcgaaaatactgctcctttacctgcctaagaaccgtagtgcgttgcctttgtaggcaagtccgaataggctgtaggaaaattcatcctatgattggacgaaagtgcgaaacccatgacagacatcgccccgctgatcaaacgctccctggtcgaccaggccctggagcagttgcgcctgcgcatcaccgaaggccggtgggccatcggtgagcgcctgcccaccgagcccgagctgtccgccgagctgggcatcagccgcaataccgtgcgcgaggccatgcgcgtattggcgttctccggcttgattgaaatccgccagggtgacggcagttacctgcgttcgatgaccgacccgctgggcgcgatgcgggcgttgtcccactgcaccctggagcaggcgcaggagacgcggcagattcttgaagtggaagccatcgggttggcggcaatgcgccgtaccgagcaagacctcatcaccttgcgcgaggccctcgataccagcgccgcgctgtatcacggcgaccttgaggcctatatcagcgctgacctggtgttccacaaacacctcgtggacgccgcgcacaacccggcactcagcgagctgtaccagtatttttcgcgcatcgttgccgcccagttgcgccagaccctgaacatttcaccgcgtcgccaagcggtgttcgacctgcataccgccttgctcgacgccgtggcacagcaaaacccggaacgcgccaaatccctctgccggcagttgatcaatgagccttgaagcccaacgtaaaaccgaattcgaagaactgttgatcgacgccgaagccgacgacgaggtggtgcagcacacgccaccgccggtgagccgcccatggctgttgctgctgggcctggtcctggtggcactgaacctgcgcccggcactgtcgagcatggcgccgttgcttgccgacgtctccgccagcctggggctgtcggcagccagggccggtttgctgaccacgttgccggtgttgtgcctgggcctgttcgcgccgaccgctccgctgctggcgcgccgtttcggtgccgaacgggtggtgctgggcatcctcctgaccctggccgcaggcatcatcctgcgcagttcattcggcgaagccgggttgttcgccggcagcctgattgccggggcgagcatcggcatcatcggcgtgctgctgccggggatcgtcaagcgtgatttcccgcggcaggcgggcaccatgaccggtgtctacaccatggccctgtgcctgggagcggcactggcagccggcgcgtcggtgcccctgagccacgccttcggtgacagctggagcatcggcctggggttctgggtcttgccggcattggtggcggcgctgttctggctgccacaagtggggcaaaagcacggtgcccaccaggtggcctatcgcgtgaagggcttgctgcgtgatcggctggcctggcaggtgacgttgtacatgggcctgcaatcgtccttggcctatatcgtgttcggctggttgccgtcgatcctcatcggccgtggcctgagcgccacgcaagccgggttggcgctctcgggttcgatcatcgtgcagttgctcagctcgctggcggcaccgtggctggcgacccggggcaaggatcaacggctggctatcgtggtggtgatgctgctgaccctcggcggcctgttcggttgcctgtacgcgccgctcgacggcctgtggggctgggcgatcctgctgggcctgggccagggcggtaccttcagcctggcgctgaccctgatcgtgttgcgctcgcgagactcccacgtggccgccaacctgtcgagcatggcccagggcattggctacaccctggcgtccatggggccgctggcggtcggcgtggtgcacgactggaccggcggctgggcggctgtgggctggatcttcgcagtgctgggcctgggtgccatcgtggccgggctgggtgcggggcgcgcgctgtacgtgggcgtgcgcagcgagaaggtctgagggttacaggtacctcacttcgatcgttaccgagccgtcgataggttgttcttcgatcaatgtcagcgtgttggccggggcgatggcggtgtcgatttgtacatcgctggtcaggtccttgactgccagcggcgcgggggcgcccgtgacgtcattgctgaaggctatgaggctgtcggggtgccacaaatagaagctgcccgggaacgtctgccacgaacttccgccgtcctctgacctgatcggcgtcaggtcccctccgtctgcggacgcgcccagaaagcgcagtgagatattccccagtttttcgccgccattgatcaggcccaggccccagtgtaggtcgagccagccggatccggggcggttatccacgcccttgagcgcaaacaccgtggcggcctcgcagttgatctgcagttgcataacggcgacaggcagttgggtggggatctctttattgaggtcgcgtgccgacaccttgccgtgatccaccacaccgccaccgctcaaggttggcgtgcaggcgctgggcgtgatcagccctttcacggtcaggtcgacgctgctggcagccagggtggtggcgccatagcccgtcaacagggtggcagtgagggcggtgataagtgttttcattttcagggtgttcccagggcagtcatcgggtcagggtgttgcggtcagaggtacaccacttccagcgtggcggaaccgtccatcggagtctcggtgctcaagtccaggttctgcttggcgttgatcaccgcctccagtttcagcgtgctggtcagcgtctggatcgccgaggggccggcggtgctgccttcgatattggtaaagcccaagaggcttcgggaaccgatatcgatcgggttgcgattggaggttcgccacgccaccccgccggtggtggactcggtgccgtagatcaccggcaagtcatcgaccacggtttgcttggggtcgaaactcaccgagtacacaccgatcttgttgccgctgctgtccaggcccagcccgtagtagatctcgctgttgacatgggcggtgccgtcgcggttgtcgcgcatgcgcagggcataacggcccgccgaattgcagttgacggtcagggtcaggtacttgagcggcaggcgtgtgccggttgcctggttgaggtcctgttgggagatcttgccgaagtcgaccagcccgccggcggacagcacgggtgtgcaggccatgggggtgatcaggccggtcaccgtcaagtcgacggtggaggcagcctgggccaacgagccgacaccgagcagggacacggcggccagggggatcaggtgagtcttcatcgcgtagctcctttttcagtgggtcagaggtagatgatttcgagggtgcccgagccgtcgagtcgcacttcattgctcaggtccagggtgtcgaggggggcgatgaccgcttcgacgttggctgtggcgctcaggtgttgaatcgcgctcgggccgttgctgctgccggcgctggcagtgaagcccagcaaacgtgtggcacccacgtcgatggggttggcgctgctgttgctccaggaagtgccggcggtggtggagtcggtgcgatacacctggggcaggttgtctgcggtggtatgcgcggggttgaagctcaaccgataacggccgatgttctgctgtcgcgcgtcccggcccaggccgtaggtgctgtcatcgtcggggccgctggcggtgccttggcggttgtcgtgcatgcgcagggcaaaaaagctcggtgcgtcgcaggccacgttgagcaccaggcttcgcggcgccagtgttgtctcctggcgcgggttcaggtcattgaccgacagtttgcccagcgccacggtgccgccattggacaggctgggggtgcaggcggccggtgcaaagcgcgtcgtccagcgcaattcgcgggcctggccggtgtggaccgcatcgaacaggccggcgctgtcccaggtcacggcgtcgcgtacccgcagggcctcttcgctggcccacgcccggccctccaggcgcaatgacaggctgcgaccgctggccgccacgccgttgcgtaacggtacgaccccgtgttccgggcgccaggtgagggtgctggcgctgctcaccggcggttggccggcggcggtaaccagccccaattcgaccgcctggccatccagcaccgcgtcggtcacccgcaggccgtagctgccccgttcggtgaagcgaaaacgctctgcgctggcgcccatggcgcggtagaacacactcacgtcggtgggctgctggcagttcagcgtgaggttgaaccggcgctcacccagcagccgttcaggcgtgggcaactgcgctgcggcgcggttcatcaggccgaaatccagctttgattcgctcaggctgagctggcagtcttccgccccccaggcgctggcactcaacaacaggatcaggggcaacaagtggggtttcaggcccatggcaagctcctcatgatgcgcggcactgggccggggcagtttcgaaatacaggtcggggtcggctttcttcggcagctcgaagtccagccggcaacgcggttggccggccgctttgatccacaacgcaccttgctcaagcacgttgggcaaaaacacctggctgccttcctgcaccaaggtcacgaactcgccgctgtcggtactcaccaccgcgccccgcggcaatggcgcaccgtggtcgttggtcacgctgagcaatgcgcgacgggtgaccaccacgccaaactgcacgctgtcgacggcaccgcgcccggccgacagcaccgccaggccgttgttgatatcggcgttgcgtggcagtgaacgggtctgcacttccaccgcactgcgaccgtaggcggtcagttgcggcaccacggcctggccttgccagtcggtccataccggcccgctgggggtgttcaccttgatcccggccatttcgcccacggacatcaccgcaaaggtgtcgcgcaccgggtacggcgagaaggtcacgccgtcgccatgcaccaccacgccgccacgggcaccgccctggtagctggcgttgtcggcattggagcgggtgtagttgaagtccaactggctgtagtacggcagggctgacacaccgagggacgattccacttcctggtcgcgactgtcacgttcaacgcccacccggtaactcaattgatcgttgagttgctcgctcacgcccaggcccaggcgatgctcgccgccggtgttgcgggcccaggcgcgggcgcggcgggtctcgcccagcggtaggctgatattcaggtacaggctgttgtcactctgctggcgaccgcccatttgccattcggcgctggccgacaccgatacccggccgaaactgctgccccacgacgccagcgcccggctgctgctgttgccgtcataggacgatgagcgggaaaccccggcactgaaggcgccaaactgcgggtgcgaccacgacgccgtggcgctctgttggtcacggtagcgcgtgcgttgttgttcacgggtggggtgacggtaggtggaatcttcaaggtcgcgataacccagggaacgccaggacgctgctgtgctgatcgaccagctttcgctcaagcgctgggaccaggagaggtcggtctgtataccttgttcgtgctgcacgcgagtggcttgagcggcttgcagcgtgccttgcaactggctgtcctgccagggcagccagcccaggttcaggcctgccgagcggtagtcctcggccatcagtgcacctgcacccacactgacttgcgggtgcagcgcaccgctccagccggcgctcaccacccagggttcggcgccgtcgtcgttgccgatcttgcgcacgcgacccgctgccaccgagtaccccggcgcgggcagccccaggccgagcatcgctgccggtacagtaaagcggcgttcttcgccgctggtttccttgaccgtgacttccacatccgagcgactgttcaagcgccgcacatcggtcagggagaacggcccggccggcaccaccgtggaatgaatcaacgtgccgttctggcgcacttcgacctgggccgggctattggcgatgccgttgatggtcgcgccctggttctggtcctgcagggcggtttcggtgaggacctgcgcgccggtgatctgggtgcccgccagcaccgggttgtacaggctgatctggccagcctgcagcaccgcctgttgggcggcgaaggtgcgttgggcgtaggcatccaggtgggtggtgcgtgaatagttgtcctgccaggtgcgcacctggcggctgcgcacaatccagtcgccggcgttgaaaccgacttcggtgttggccgagccgaagcggctgttgtcgtcgtcgtattcgttgtacagcccggtcaggtcatagttgagcaggccggcgaagccgccggtctggtagccggaaatatcctgggtgacggggcgcagtgcatccgtcggcaccaccagtgacagggtcagggcggcggggtcctgctcgatcacggtctgcggataggcttggataaacccgtagcacgcgccgtattgcgcactgtcgatggcttgctcgggcacgttgaggttgcctgcgtccagcagcccgcgggtgaaacacaaggcgccttgctggtcgaagaccgcgtccacgcgttcgcggcgctggccgttgacggtcaggttgactgcgtggcgtccgggggcgaagcgtggggcctccagcagcaggtgggccagttgggggtcgatgccccgttgggacagggtctgggggtcgaaagtgccccgggttgcggtctcgtcggccaggctttcgccgccgggcagcgtgctgcccagggccagtgccaggagccagcgcgagcggcgcgataaaaaaccgggcgcgacggtgccgtcgcggtcagtggttactgtgctcacaaggtcgtactcaatgtggtgaccttcaatgggaggtcacttcgttatcagggcgctggcctgtctgtgcctgcgcctgggatcagcgggtgagaggcgcgtcgtagggcgccacggcaaagccgtacacggtggccggttgcagttgcacggtggttgcgcccggtgcgctggcggtaacctgcaaggtttcccccggcagcacataagtgcgtggcagcagcgccgagccgttgccgggcagcaaacgcagctcctgggccaggcgcaccacataaggcgtagggttgtgcacgctcaactgctgctggtcgaggcgccaggtcaagccggtccagggcgaacgattgggcgccaggcccttggggtgcaggatcaccggcaggttctggcgcaccgtcacgccgacccgcgcatgcccggcctgggcttgcgagcgtccttgcggcatgccttcgaaaatcactcgtttcaggcgttgggttttcagcggctcgggcgattgcaggatgaaccggatgagttggctcttggacggctcgacccgggccaacggcggcgtgacgaacagcagggtggccttgtcttcggggatgtcttccagggtgacgtgcagcagggcgagccgcgagtcggtgttggtcactgacaccgacgcttcgccgtcggcttcgttgacgatgaccaccgacgtgtcgggcaccataccgtcggccagcacccatgtggggccgccgaatgtcagggccagcgcacccaggtagagaccggcgtagcggatggccgtgaaggctcgggttgaaaagggcagaggggacatggctacaaatacctcaggtcaagcacgatggaaccgtccagggggacttcctgcttgagggtcaaataggcggccgcattgatcgacgtgttgacttgcaaggtggccgtgatctggcggtgcggttccggcaccaacgtgccggggtgggcgaaccccatgtaattgttcgggtaggcattggtttccgggaaccaggtctgtccctgattgctggaggccagcactagcacgcgctcgccgtcgcccatcacgtcgcgaaaggcaatggacacggtgccgagtcgctcggtggggacgtggacgttgtggcccaggccgtagtaaaagcccgggcccagggatgagtcggcgcggttgtccaaacccaccaatacaaacagcaccgagtcgttgcagctcacgtccaagtccagggcttgggtgggcaagacactgaactcgaattggttgagcgtgtgtgccggcaccctgccgtggtcgacgatgccgttggccgacaacgtcggtgtacacgcgctgggcgtgatcagcccggtcacattcagttcggtgctggatgccgccagtgcagcgcagccgccactcagcaggcaaaacagggcaagaaggcgtgaagaggtgtgcttcatgggggaggttcaccggttgcctggttcatcgtttcaatacagcgcaacggcaggtgcgatggcctgccgctgtgcgtttcaaagtgggcttacaggtagcgcaccgtgacggtcaccgaaccgtcgatggccacttcgttggtcagcgtcaactggctggccggagcgatttttgggctgacggtcaggtccgaggtcagcacctgcaccgggatgggcgcgtcgacggcggtgtcggccaccgagatcaggttgtcgggcgtcaagttgcgcgcaacgacccaggtgacaccgccgtcgacagaggtgatcggccggcccgccacgccatcggcgaccggcgtgttcaggctgagggtcatggcgccgagcttttgcgtgccgttgatcaggcccaggccgaactccgtgatgtcgtcaccgtagttcgaacccggtcggttgtcgtcggcgtccagggccatgagggtggccgcgtcacaggtgaccgtcagttgcacggtttgctcggtaagcggggtgacctggtcgacattcaagtccctggcggaaatcttgccgtagtccaccgacccactgttggacagggcaggtgtacaggcgctgggggtgatcatgcccttgacggtcaggtcgacgctggaggcagcgaaggcgctggcgctgccgatcagcagggtggcggcgagcagggtattgagggatacattcatggtcagtctccaaaaaaagaaggtaaaaaaagggttaccagtacttgagctgcaacgtcgcgtgcccatcgatgggcaactcgtcgagcagggtcaggccgctggcgggggcgatgatggtgaaggcgcgcaggcgcgcactgagttcggtgatggcaatgggggtatagggtgctcccgctgccgaaaaggcggtcaatgccgcgtgccccaggtaggacgacggtccccagcttgcaccgccgtcacgggacatgatggtctgcaccggcgccgtgtcggccaccggctcgaacaacccgagcgcgacactgcccagcatctggtcatcgttgaccatccccagcccgtggaacaccgggttgatcgctgaggtgccgctgcggttatccaccgtggtgagggtgaagtgggtggcgccttcgcaatgcacttgcagcagcatctcgcccggttgcaggcgggtgggcaggtcgatgtccaggtcccggccggtcagcttgccatgatcgacgacaccgtcattggacaggcttggggtgcatgagctgggcgtaatggtgcccgtaacgctcaggtcggtattgctggccgcgaaggttgcgggggcgcaggcggccagcaggagggcaagtgtggcgcgggttcttctgtccatcggcacgggtccttgtgtgaagagaaaagaggggattacaggtagcgcatttccagggtggccgagccgttgagtagatactcctcggtcagggtcaggccgcgggtggcggcgatgtagccgtagatgagcaggttgctggtcaagttgcggatcggaaccggtgcccaggccccgcctgagtcgtcgccgaaaccggcgagtcgaccacggatccacaatgcgtttggcgagctctggatccaggtgacaccgttgtctcgtgaggacagggtggagatcggcagaccttcggcggtggagctgttcagccccaggtggtaagcaccgatggagcggttctggttgatcacccccaggccgtaggaggtatcgccgccgccttgaccattctccaaggcatgaaatgcaaacaacgttgcggcgtcgcattccacgctcagttgcaggttggcggtcggcaagaccgtggcgctttccacgtagaggtcggcgaaggcaatcttgccgtagtcgacaacgccgcctgagctgagggtaggcgtgcaggcgttcggggtgatcacacccgtgacgttcaggtcggtactgctggcagccagcgcaggggtggctgcggccatcagtaaggtggtgagaagcagggaatgtgggactttcatttgaacaacatattcctgagcaaagtgttggcacgaagggcagtgagtggctcgggtgaggcgctggcgtcgagggttggattgtttttgtgggcgacgacgcgccttctggttgtgttgagccgggacgcatttaacgcccgttcccgacggtggcggaatgcaacaattacgatagtgatgccgccggatgaacctctgcagcgtcgattgaaacggctgacgcgcttgtaagaaaaagtgcttagtcgtagttgttgtatcgccctattacattcattcggatatttttcgcgctctcttaatccgcacagtctgtttttttgaacaggtctgaatgtagttgcgcgaaaagttcgagtgaaatcgtccggcaggtcatcaacctctcaggcgtctccctgcgccaggtgcacgcctggtgagctgatcgctctgcatgaggttgttatgccgggcaatgatccacgtcgtcatccacgcaaggcctcgcactcgactgccgcgccatcccattggcagcaagccagagtcctggtggccgacgaccatgccacctaccggttgctggtggggtcgttgctccaggtgctgggtgtcggccacgaaacctgcagcgacgggcgcatggccttgcaggccttggctgcgcgtcactttgatctggtcatcagcgattgccgaatgcccgtcatggatggttatgccatgacgcgcgaattacgccgacgtgaacgggctgcgggcaggccgtgtgttcccgtcatcgccatgaccggtcgcctgggccgggaagagattcgccgttgcctggaatgcgggatggatgggtggctggtcaaaccggtcagcctgaggcagttgcgcgagttgctcaccgaatggttggcgccaaggccgttgcatgcggagcagcgcaagcagtcgttgccgcgtcgacgcgaagcgctgccttcgcgtgcccgccttatcgcgacctttggttcctggacggtggtagaggcgatgttggcgagcctggtgctcgaggcccgggacgacctggcagtgctggagcaggcgcgcatcagcggggatgccctgttgacctcgcagcgcttgcaccgcctggcgggcagtgtggcgttcctgggggcaacgcgattggagcagcacgccgccaggttgattgaccgcgtgcaggccagcggggtggaggtgaatcggcaggcactcgagctgtttcatcgtgacgtcgaacgttacctgcagcgtttgcatcaactctgaatccagggatttgtaagagttttcatgtatgaagtgtaggaataatctgtatgtaatttctttttattgtgtgggctaaatgttgctctccaataactagggggagtaggaagagccgtccagttatttcaggttgttgcatagggctgagcgagctattttgcatgtattcaaattgccatcatgggtaacgacgatgattcgcataattattgctgacgatcaccccatcgtccgtattgggcaaaaagtggtaattgaagccagtggtaagtgcaaagtcgtaggggaggccaatggtccggatgaattgctggcgctggtgaacagtaccgcttgcgacgccatcgtgaccgactttgccatgccgggcgatcagcaggcggatggctacggactgctgggtttgttgcaccggcaatacccgaggttgccggtgatcctggtgaccatgttcgccaacgtggtcacgttgcgcgaggcattcgcccatggcgcgcgggcgatcgtggccaagagcgcgtctgcacgggagctgcccctggcgctgcgggcggtggtcgaggggcgtacgtttgtcagtgagtgcctgcgcctgcagatggagcagacccaactggcgcatccgtcccagccacaattgtctggcaaggagcgagaggtggtaagaatgctcgccagcggcatgaccgtcagccagatcgccgcgcgggtcaaccgcagtatctcgaccatcagcaaacagaagagcacggccatgcagcggctatgcatttccaccgatgtggatcttttcacctatgcgcggcaaagcggcatggtgccttagttgttgtgcatggcgtgaaagtttcagatttattatgtagttaatcaggatattcgtattacttgtatggggcagtagtgtggggcgagttagtgtgtgttcatgtacccggcagtgataagtcggcggcataactacctatgtccaacacagggtcaggcggaggcgagtgtcttgttattcgacaaggcaagcgtttccgttttgccttgaatgcgagcacttgaataaatgaaacaatcactttcccttgttaccagcgcttttctattgatgggcgcctcgaacttgtttgcggcttccagtattgacctgagtgtcgtgggtgccttgaccccttccgcctgcaccccggctttgtccggcggcggcgtggtggatcatggcaagatttccatgagtgatcttccttttgacgcctacctgcctgaggcgacgctggcgttgagtgtcaactgcgaagcatcgacgctgatggcggttatggctaccgacaatcgccccggtactgcttggtacggctacgacactgatagcgcatttggcctgggactttacaatagccggcggtggggcgggtatcagctcctcgtgaaaaacgtccaggcggacggtgcagcggcaccggcgattgagtccgtggatggcaaaacctggtttcccgcgcccgaagaccaaacctggcaagtgggctggatgcgttcggtgggggcggtcggtgaagttgacgcgctgccggtaccggtccagaacctggcaatggaagtattgatccagacccgcgtcaggaagcctacgggcgctaccgaggaagtccctttggacggcagcgccacgctgagcatcttctacctctgacccaccctcgcttatccaccgggtgaatgagcatggtgtttccgggcgccgcggattatcgtgctggccttatgccgataactgcggagcctgcccatgagtgatgcccacaacgccttgatcaccgagttctacagcgcgttccagcgcctggacgctgaagccatgtcggcctgctacaccgacgatgtggtcttcagcgacccagccttcggcgaactgcgcggccgggatgccggtgacatgtggcgcatgctcaccacccgcgccaaggatttctccctgaccttcgacaatgtgcgcagcgacgaccgtagcggtggcgctcactgggtggcgacttacctgttcagcgccaccggtaatacggtggtcaatgatatccaggcgcgctttgtgtttcgcgacggcaagatctgcgaacaccatgacagcttcgacctgtggcgctggtcgcgccaggccttgggcaccaagggcttgttgctggggtggacgccgctggtgaaaaacgccgtgcgcgcccaggcacgtaaaggcttgaaggcattccaggccagtcgttgataagcttggcaattcctatgccttgccgaatcgatccgtgaatacgcctgaccccaaaccctggttcgtctacctggtgcgcgccgccaatggcgcgctgtattgcggcatcagcaatgacccggtgcgccggtttgcctcgcaccagagcggcaagggcgcacggtttttcctgtccagcccggccgttgcgctggtgtacaccgagcaatgcgcgagcaagggcgaggccctgcgccaggaacgcttgatcaagaagttgaagaagagcgccaaggagtgcctggcggcaagcggctcattgatttgactgatgggttcccatcatgcccgcgccagggtttgcaggctaagctagcgattcacttctctagcggagcctggcatgtccgaattgatcctgcaccactacccgcagtcccccttcgctgaaaaagcccggctgttgctgggctacaagggcttgtcctggcgctcggtgcatatctcgccggtgatgcccaagccggatctcaccgcgctgaccggcggctatcgcaagacccctgtgctgcaaatcggtgccgatatctactgcgacaccgcgttgatcgcccggcgcctggagcaggaaaaagccgcgccggcactgtttccccagggcctggaactggttacccaaggcttcgccgcctgggccgattcggtggtgttttcccatgcggtggcgctggtgttccagcccgaatccctggcggtcaagttcgccaaggtgccgccggaaatgctgcaggtgctggtggcggatcgcagcaagctgttcagcggtggcacggcgactcgggtgcaattggatgtagccaagcatcaatggccggcgattgtcagccgcatcgaccagcaactgcagcaccaggccggggatttcctgttcggcgagccatcgattgccgacttttccctggcccatcccttgtggttcctcaaaggctcttcagtgacgtcgcctttggtagacgcccatcccgccgtcgccgcctggttggatcgtgtgctgggcttcggccacggtacatccactcagatgagcgccgagcaagccctggacgtgtcgcgcaatgcggcaccggctgcgctgcccgaagaactgtttgaagacttgaacggtttcaaggcaggccagcaggtgaccatctccgccactgactacggcaccgaccctgtcgccggcgaattgctgtttgccgggcgtgaagagctgatcctgcgccgcaccgatgagcgcgcgggcaccgtgcatgtgcatttcccgcgcatcggttttcgcatccaggcgcagtagggaaaaatatttgcaaataaaagtgaggtaaatccaccgcccaaccgtgtagtgcttgaaactgcgatctattcgcattaacagcgttttctacacgggttctcacagcatgaagtcagcggcgggcggttgggtaaaacagtggctgggagcctcggcattggcggtatcggggctggcgttgctgcccctgagcgtggtgcaggcgcaggagcagcaaagtgcccagttcaactttgccctggcagccaagccgctgccccaggccctgagcgatttcagccgggtcaccgggatcagcgtgatctacaccgacgaagcgccctacggcatcaaggccccggcggtcagcggccagatgagcgccacccaggccctgcaacgcctgctgggcagttccggcctgaccttccgccagatcgacgcccgcaccctggcccttgagccggcgcctaccgaaggcgcggtcaaccttggcgccaccaccatcagcggtgccaaccagacccaggacagcaccagctaccaaccaccgcccaccagctcggtgatgcgctcccatggcctgctgctggaaaccccgcagaccgtcaacgtggtgccggcccaggtgttgcgcgatcagaccccgcgcaacctggatgacgccctgggcaatatcagcggcattacccaggccaataccctcgccagcacccaggacgcggtgatgctgcgcggctttggcgacaaccgtaacggctcgatcatgcgcgacggcatgcccatcgtgcagggccgcgcgctgaacgccacggcggagcgggtcgaagtactcaagggcccggcgtcgttgctgtatggcatccaggatccgggcggcgtggttaacatcgtcagtaaaaagcctgaactggtccagtccaccgccctcaccgtacgcggctccaccttcggtgacggcaagaacggcagcggcggcagcctcgacaccaccggcccgattggcgacagcggcctggcctatcggctgatcgtcgatcatgaagatgaggattactggcgcaacttcggcacccaccgcgagagcctgatcgcgccgtcgctggcctggtatggcgacagcaccaaactgctgttcgcctacgagcaccgcgaattcctcacgcccttcgaccgtggcaccgccatcgacaaatccaaccacccgctggacatcccggccacacgtcgtttggatgaaccgttcaacaacatggaaggccgttccgacctgtaccgcttcgaagccgaccacgacctgaacgacgactggaaagcccacttcggctacagctggaaccgcgaaacctatgacgccagccaggtgcgcgtcagtgcggtgggtaataatggcgccctgacccgcaggatggacggcaccaagggtgcgatcaccactgaccgctttaccaccgcgagccttgaaggcaaggtcaatgtgttcggcctgcagaacgatctggtgtttggcctggatgatgagtaccgcaagatctaccgggctgacctgattcgccagaactcccgtggcaccttcaactacaacaacccggtgtatggcaacgaagtggcgggtactaccgtcagccccgccgacagcgcccagaccgacctgctgcgcagcgactcgctgttcttccaggatgcgattcacctcaacgaccaatggatttttgtcgccggtgcgcgctaccagatgtatgaccaatacgcgggcaagggcgtaccgttcaaggccaacaccaacggcaacggccaggcctgggtaccgcgtgcggggctggtgtaccgctacaccgacgagctgtcgttctacggcagctacaccgaatcgttcaaacccaactccaccatcgccgccttggccgatggcagcacgctgaccggcgacctgacgcccgagaaatccaagtcctgggagctgggcgccaagctcgacatccccgggcgtatcaccgccagtgctgcgttgttcaacatcgacaaacgcaatgtgctggtgtcatcggaagtggctggaagcaccatctatagtctggctggccaggtgcgctcccgtggcctggaactggacgccaccgggcaactgaccgacaagtggagcgtgatcggcagctacgcctacaccgacgcggaagacaccaaggacaaggacccgaccctggaaggcaaccgcctgcagaacgtggccaagcacaccggctcgctgtcggtggcctatgacttcggcaatgtgttcggtggcgatcagttgcgggtaggcaccggcgcgcggtatgtcggcgagcgagcaggcgatgccgccaacgacttcaccctgccggggtataccgtggcggatgcgtttgccacgtacgacaccaagatcgatgggcagaaggtcaagttccagctcaacgtgaagaacatgttcgaccgcgtctactacacctcggcggccagccggttgtttgtgtccatgggcgatgcgcggcaggtgtcggtgtcgagcacgctggagttctgatgcgcctattgtgtggcgagcctgctcgccacagggggagggagctgttagcgttgctgccactgacagctttaggaaaacgctactgatgtactttggaaaatggatacccaccagcgggctgctggtgggcttgagctttttgctgggtggttgcgcgagtgtttcccagacgtccaccccaaccatcatcgaccaattgatggccgacccggccctccatggcgccactgtttccctgatggtgcgtgatgcccgcagcggcaacaccctctatcaacacaacccgcgaacccgcctgattcccgcatccaatctcaagttgctcaccaccgcagccgcgatggatgtgttggggccgcagtatcgtttttccacgcaactgttgagcaacggcacgcagcagggcgagcgtctcagcggcaacctgtacctcaagggcctgggcgatccgaccacgcaattcgccgactaccaggcattggcggcacagcttgcagccctgggcgtgcgtcaggtccagggtgacctggtgttcgacgatacctttttcgacgccgaacgcttgggcgtggattgggcccaggacgacgaaagcacctactacggcgcgcagatttcggcgttgactgtgtcacccaatgccgattttgatgcgggcacgctgctggtcacggcgaaggctcccgccgtggtgggtcaaccggtcagcgtggtggtgagcccggcaaccgactatgtgcaagtgaacaaccgcgccgtcagcggccccggcaacagctatggcattacccgccagcacggcaccaacctgctgcaactcagcggtgcgctggccccaggcaagcaaagccggcagtgggtgagtgtgtgggagccgacgcaactggtggccaacctgtttgaacaggcgctggcgcagcagggtatccaggtgctgggccgtcgtgtgataggcagtgcaagtccagcgacggccaaggtgctggccgaacatcagtcggcaccgttgcaggaactgatcacgccgctgctcaagctgtcgaacaacaacatgtccgaagccttgctcaaggccatggggcgcaagacgtccaacgcaggcacggcacaggcgggggttgctgcggtgggggacttcatgcggcgccagggcctggacccgatgacgctgagccaggtcgatggttcgggtctgtcgcggcgcaacctggtgtcttcccaggggctcactgatttgctgctggcgacggccagacagccctggttcgacgcctggtacaacgccttgccgattgccggcaacgccgaccgcatgaccggtggcagcctgcgctaccgcctgcgcgggacggctgcgcaaaacaacctgcacgccaagaccggctccatggccggtgtgtcgtcgttgagcggctacatcaccgacgccgagggccggcgcctggtgttttcaatgatcagcaataactacctgagcaccgccgcaccgatccgcgccctggaaaaccgtgtggcgctggccctggtgcaatggcacgactagctcagggctgataacccatacgccaactcacagcccggctcgccgccagcaagcgctgcgccgccgggccgtcttcatcggcgtggaacaacgaggtggggccgaccacggtcatcaccgccgccacctgcccgatggcattgaacaccggcgccgacagcgcatcgacaccgggcatcagcaaaccatgcacaaaatgcaggccacggctgcggatctgttcacaggtggtggcgtaggcctggtcgtccgccagagcgtgggcgatgccggcctggatctcacgctcgcgcagctcaacggtttcccgcgacggcaggaaggcgctgaacaccagcccagtggatgaactgagcagcggcagcaccgagcccagttgcgttaccaccgtcactgcgcgcactgctggttcgatctgcaccacggtcgcgccctggttgccccacactgccaaaaagcaggtttcattcaattcatcgcgcaactccgccaggggcatggcaccgactttcagtacgtccatgctgcccagcgccgccaggccaacccgtaacgcttcgcggcccaggccatagtggttggtggcggtgttctgttcggcgaaacccgaggcgatcagcgcctgcagataacggtgcaccttgctggctggcatctgtacatgttcggccaggcgtgacagcgacgttgccggggacaactcggccagggccttgaggatatcggtgcccacttcggccgagcggactttctgtttaccggtgtcgcggggcttttccatggaggggcgagaatccgagagatgaatgggcgtctttatagcttgacggtcgatagtgatcaaattacgttatgcgtaactggattacgataaaaacaacttccgtacagaggatgatccatgaacctcgaatacctgtcgggcttcggcaatgaattcgccagcgaagccttgcccggcgccctgcccgtcggccagaactccccgcaaaaagcgccctatgggctgtacaccgaactgttctccggcaccgcgttcaccatggcccgcagcgaagcccgacgtacctggctgtaccgcatccagccgtcggccaatcacccggcgtttatcaagctggagcggcagttggccggtgggccgttgggggcggtgacgcccaatcgactgcgctggaaccctttagatatcccgagcgaggcgacggactttatcgatgggctggtaaggatggtggccaattcgggttcggaaaaaccctcgggcatcagcatttataactaccgcgccaaccgctccatggagcgtgtgttcttcaacgccgatggcgagttgttgattgttcccgagcaaggccgcctgcgcatcgccaccgagcttggcgtgttggaagtggcgccgctggaaatcgttgtgttgccccgtggcctgaagttccgcgtcgagctgctggatgcgcaagcgcgcggttacgtcgccgagaaccatggtgcacccttgcgtttgccggacctgggtcctatcggcagcaacggcttggccaatccgcgtgatttcctgacgccgattgcccactacgaagatgtgaagaaacctacaacgctggtacagaaattcctcggcgaactctgggcctgcgagctggaccattccccgctcaacgtggtcgcctggcacggcaacaacgtgccgtacaaatacgacctgcgccgcttcaacacgattggtaccgtcagcttcgatcacccggacccgtcgatcttcaccgtattgacctcgcccaccagtacccacggcctggccaacctcgacttcgtgatcttcccgccgcgctggatggtggccgagaacaccttccgcccgccatggttccaccgcaacctgatgaacgaatacatgggcctgatccagggcgcctacgacgccaaggccgaaggcttcctgccgggtggcgcatccttgcacagctgcatgagcgcccatggcccggacggcgagacctgcaccaaggccatcaatgtggaactggcgccgcacaagatcgataacaccatggcgttcatgttcgagaccagccaagtgctgcgcccgacccaattcgccctggactgcccgcaactgcaaccttcctatgacgcgtgctgggcctcgctgcctgccaccttcaacccgaaccggagataacccatgactcagcccacacttacccgcagttgggtggcctccgccaacggtcacaccgacttccccctgcagaacctgccgctgggtgtgttcagcatcaacggcgcggcaccacgcgtcggtgtggcgattggtgactcgatcctggatttgcatgccgccatcgacgaattcagtggcgaggcccgccgcgccgtcgaggccaccgctggtggtcaactgaacgccttgtttgaactgggccgtggcccgcgcgtggccctgcgcgagcgtttgctggagctgctggccgaaggcagccagctgcaaacccgcgaggcgcaggtactgcaccgcgccgccgattgccagatgcacgtaccggcacggatcaacgactacaccgacttctacgtcggcatcgagcacgcgcagaacgtcggcaaattgttccgtcccgacaacccgctgctgcccaactacaagtacgtgccgattggctaccacggccgcgcctcgactatccgcgcctcgggcaccgacgtgcgccgtcccaagggccagaccctgccggccggccagaccgagccgaccttcggcccgtgcgcacgcctggactacgagttggagctgggtatctggatcggccagggcaatgcgatgggcgattcaatcgccatcggcgacgcggcggaccacatcgccggtttctgcctgctcaatgactggtcggcgcgggatatccaggcctgggaataccagccgttggggccgttcctgtcgaaaagcttcatcaccacgatctccccatgggtggtcacggcggaagcacttgagccgttccgcaaagcgcaaccgccacgccctgaaggcgatccgcaaccgttgtcgtacctgctggataaacgtgaccaggctgccggtgccctggatatcgaattggaagtgttgctgaccaccgccgcgatgcgcgaacagaagctgccggcatttcggttggccctgagcaacagcctgcatatgtactggaccgttgcgcagttggtggcgcaccacagtgtgaatggctgccagttgcaggccggtgacctgtttggttcgggcaccttgtccgggccgcaggcgggccagttcggcagcctgttggaaatgaccgaaggcggcaaaaaggcggtcgagttgccgtctggcgaggtgcgcaaattcctcgaagatggcgatgaaatcatcctgcgtgcacgctgcagcagggaaggctttgcctccatcggcttcggcgaatgccgtggcaccgtggtcgcggcgcgctaggagggcagggcgatggaactctacacctactaccgttccacttcgtcgtaccgggtgcgcattgccctggcgctcaagggcctggatttcaccgccgtgccggtcaacctgctggtaccggcgggcggtgccaatcgccagcccgagtacctggcgatcaacccgcagggccgtgtgccggcgttgcgcaccgatgagggcgagctgttgattcaatcgccggcgatcatcgaatacctggaagaacgttatccacaggcaccgctgctctccaacgatctgccgacccgagcccatgaacgggcggtggcgtcgatcatcggctgcgatattcatccgctgcacaattccagtacccagaatctgctgcgccagtgggggcatgacgaggcgcaactgctggaatggatcggccattggatcagccaggggttgggtgcggtggagcagttgatcggcgacacagggttttgcttcggcgagcagccggggctggccgatacgttcctgattccccagttgtacgcggcggaacgcttcaaggtgccattggcggcgtacccgcgcatcgggcgggtggcggcgttggcggcgcagcatccggcgtttgtgaaggcgcaccccgccaatcaacctgacacgccttaggacccaatgtgggagggggcttgcccccgattgcggtctatcggcaatgaatgcgtcgacggtgccaccgtattcgggggcaagccccctcccacattttgactgcgacacccttataaaaataataggtaccttgcgatgcacaatcagattgccagctttcgcgcggcactcgacgcccgtccggtgtcgcgctatcagtggttgattctcctgttactggcgctgctgctggtgaccgatggctacgacgcccaggtcctgggttatgtggtgccggcactggcgcaggattgggggttggagaaggctgccttcggcccggtgttcagcgccaacctgctcgggctgaccttgggctcgttgctggtcacgccgctggcggatcgtttcggtgtgcgtcgtatcctgctcggctgtgtgctgatctacgccaccctgactgtgctgatggtgttcgccaactcgctgaccacgttgatggccgcacgctttatctgcggcattggcatgggcggcgccatgccgagtgcgatggccttgatgtcggactattccccaccacgcctgcgcaccttgatggtgaccttggcggcttgtggtttttcgttcggcggggcggcgggtgggtttgtggcggcggggtttatcgaaggctttgggtggcaggcggtgttcctcgccggtggcgtgacgccgctgctgctgttcccgtttctgatgtggctgttgccggaatcattgccgcgtctgctgcgagacgcaccgccttatgcgcggctgcaaagcgtgacgttgcggatgttgccgggctggcaaccgccgctggccactgaggcggaaaaccaacaggagcagggcagcaaactgacggtggtggagttgtttcgcaacggctacgcgcgcccgactgtgctgatctgggcgaccttttttgtcagcctgatcctgctgtatttcatgattagttggttgccatcactgctgctggaaagtgggctggcattaaaagaagccaacctggtgacttcgatgttcctgttcgccgggaccttgggcgctatcggcatggcctggttcgccgaccgtttgaaaaacaaagtgcgtctgttgtcgggcgtgctggcggctgcggcggtgtgcaccatcctgctcggtgtgaaccatgacaacccgcgttacctggtagcctgtgtgtttgcggccgggttttgcatcatcggtgggcaattgaccctcaatgcctttgccagcaatttctacccggcacatgtgcgcgccacggggacgggctgggcgttgggcgtggggcggtttggttcaatcctggggccgttgtttggcagtatgttgctggcgatgcatatcccggtgcagcagattttcttcttttgcgcgatcccggcggtggtggcggcgttgttgatcattcaggtgcgttcgcctggggttggggcggcgaagagcccgttgcccggcgacattttcaagacaccagccaatcactgacgcgggcttcacggcgagcgcccttgttgtggcgagcgggcttgccccgcgttgggtcgcgaagcggcccctgaattgggcctgctacgcagtccaacgcgggacaagcccgctcaccacagaaagaaatgatctcttggaattcgtgtgttcagtgcaccactgaattgggcggcaaatgccccaggcgttcggtcaggcgcaggcgctggatcgggtcttcgctgagcatcagcgcgtgttccaggtcgaaacgctcggcgttggggcagtccaggcgctggtacaggctggcccgtgccaggtaatcggcggcgctggcattgcccagttccagcacacgttcggcgtcgaccagtgcctcgagcggggcgtcgttggacaggtgcaattgccgcaggttacgtgacagccgctgcaggatcgaacgcgggtcggcggtgtgcaggtggtcggcctgcagcttgaggttggggccgtactggcgttgcagcaggtcgcggcaatcattggggtacaggcgtcggccgccgcacgggtccaacaggtgatcggcaccgggtacgcgcagcaggaaatgcccggggaagttcacgccgaccatgggaatatccatccgtcgcgccagttccatggcgatcagccccatcgccaggggttgtccgcgcttacgttgcaacaccttgtccagcaaggctgccgcggggcgcagcggagtgaattcatcctgggcaaagcccaggtcattcaggcgccgcagcagcggttgaccgagttcatccgccggcagcatgggcatgccgatgctcacctgttgttgcagcagcgtcagttcttgcatgacaactgacggctgcaccgccgggtcatgctcggcagcaatccacagcgccgcttcaaacagcgcgggcggggagcgttccaggcaggcgaaaaaggctttgcgggggttcattgcattctccggcggatgcccccgttttagccttgctgggaattttcgtccagtggcttgggaaatatcctgcgcgcttatgtcgcaagtcctacgaaatcgaacggcttattccagcgtattccggcagttttctaccgcaagcctatacttggcccactaccagaagtgactcgggagcttgacgatgtttgctctcatgcacagcacccgccttgaatcgctgcacttgagcgtcgacccggtcaccgggctgaaggcggtcattgccatccacaacagccgcctggggcccgccctcggtggctgtcgctacctctcctatcccgacgacgaaagtgccgtggcggatgccgcgcgcctggcccagggcatgagctacaaggcggccctggccggtttgccggtgggcggtggcaccgccgtgatcctgcgtcccgcccatgtggaaagccgtgctgccttgtttgaagccttcggccgttgcatcgaacagctcgacggacgctacatcacggccatcgacagcggcacttcggtggccgacatggactgcatcgcccagcacacccgctacgtcaccagcaccaccgccgcaggcgacccttcgccccacgccgccatgggcgtgttcgccggcatccgcaccaccgccatggcgcgcctgggcagcgacaacctcgaaggcttgcgcgtcgctatccagggcctgggcaacgtcggcttcgccctggccgaacagctgcacgcggccggcgccgaactgctggtgagtgacatcgaccacggcaaggtgcaactggccatggagcaactgggggcgcaccccatcgccaacgacgccttgctcagcacaccgtgcgacatccttgcgccctgcggtcttggcgccgtgttcaaccgccagagcgtcggccaactgcgctgcgccgccgtggccggttctgccagtgcccaactgacccacctggacaacgccgatcaactggaggcgcgcggcatcctctacgcaccggactacgtgatcaactcgggagggctgatctacgtcgccctcaagcacagcggtgccgagttgccgtccatcaccgcgcacctgtccaacatcggcacgcgcctcaccgaaatcttcgcccacgcccaggccgaaaaacgctcacccgcccgcgtggccgacgaactcgccgagcgcctgctttaccaatagccaggtattaaaaaggccctgaaccaaagattcagggcctgttcaattcgggctttattccgccgctgcgttcagcaactcggacaacgcgtccggctggctcttgaacgccttggcaaacacatcgcggttcttcgccatgtagatcccggcttcttccacctgctgctcgctcagggacggcacggctttttgcaacacttctgcgagcaactcagcgagttcaagcatcttgtcatgacggtcagcttcggctttatccatgaacaaacgctccagatctcggctgctgcggtataccacttcgacggccattcaccacctcacatgccttcacgatagttgtcttttgcgactactgtatttatatacagcgaaaagggtaagccaaaccgtggggtttgggtagcagttttttaatgtagtcgggaaatgggggtttgctacaacggaaatttctgacaacttgccggggttgcgctggaattgtccggcggcttaccttcctcgggcgctgcattggcagcgaatgggcttggcggcccaacaaggaagcgcaacaaccctctatgagatacagatgcttttttgcatttgtattcttatgtcatggcgggttgcgcatggacccctcggggtgccgggtcgttccttaccggtccgccaaccttgtgcaatccgtcacccaacctgcttggcggcagacggtgatggtttctttactaaggaactagaccgatgaagaaaatcactcccaaccctccgtctatcgattcgacgctatttcgcgttacacctgaagctgacacagaaacattactggccaacgccagcgaaactctaagcagcgcccgtgaaatggccactacgctggcattcgaccttgacggtccgcagcggagtctagtgttagccattcaccaattggttgagataggctgtctgttagtcgaccgagcgttagagaaagtcgcaccagtttgatgcttcgccctctgaccgctcccgcggttgcgggagcggtcaaaacatggtctcggtggcttcgattttttctgttactcacttgatcgctcagaacacgacagcgaaaacgccagcgactagactccttcttcatcgacaacggaggcttttatggacacttccttttcctctggtacccaggcagataccgaagagcaggccgatagctacgaccgctggtttcgcgccaagatacaagctgctcttgaagacaccagccccggcattcctcacgatgaggtgatggccgagatgcaagcgctgatcgagtccaaactcaagaaaggcgatgctgattgagtgggtgcccgcagcgcgggtcgaacttcggcaaattattgaatacctcaatcatcgcaatcctgtagcagctcttgagctaaagcgctcaatcgaagcttcagttctggctctctcccgcagaccccatctttaccgtcctggcagaatcctcggtacgcgcgagatggtggtacatccgaattacctggtcgtttacaaggtgacagacaacattcgggttctctctgttttacacgcacgccagcgatatccctgaccgatccgtacttcggatgagcatagtttctactctgctcatccttatacgtgtctcatgtcaccccgccatcatcttatacccgcccctggccttttttctgcatgcagaacaaccgtcacgtccaacccgcattatccggtcgagtcgacctaaggaagcatcatcgtgaaaatcaactgggccgaaaggctgcgccagcaagtacacgggctggccgagtccctgggtaacctgttcgtcgagtcgttccactacctggcgctgttcgccattggtgcggtgacggcctgggcggcggtgatggagtttctggggatgctggagaacgggcacatcaagatcgatgacatcttgctgctgttcatctacctggaattgggcgcgatggtggggatttacttcaagaccaaccacatgccggtacgcttcctgatctacgtggcaatcaccgcgctgacgcgtctgctgatctccaacgtgtcccaccacaacccgccggatgtaggcatcatctacctgtgcggtgggattctgctgctggcgttctcgatcctggtggtgcgctacgcctcgtcggcgttcccctccgtgaaggtcgaaggcccgcgtcgcaagggcgaggcgagcctggaaaccgagaagggcgagctttaaagcccgacgctgaagggcagggtgcgggtaggcggccgctggagcactttgtggtcgccatccgtcatcaccgtgaggatgtccaaggcgctgtgcccctgttcgatggcaatgccgaactggatgctttgcaccaggcgcttgagtcgctttggatcgttgcgttgttcggcgctgatcatgcgtttggccaccacgccttgttcgttggagagggtcagcatgatgctgccgtccaaccgttggatgctcaggttgacacggtattcgggcgtgaaggtgtcggtgatgatctgaaaagggttgtccatggtgcgttaccgcctgataagaacatgcagtcattgacgaccggtatcgggattagttcgcgttgcctgaccaccggccactccgtcgctgaggtttcacaaggtccgtttgcctccacagctgtacagcaaaggccgtgccgtgcggcgctcgtatcccaatgtgggagggggcttgcccccgatagcagtgtgtcagccaatgaatgctcggctgaaagaccgctatcgggggcaagccccctcccacagttgtttcgggttgtgcttgaggtgggtgacctgtttcagggcagtaccgagaaaacgatcgcagacagcgcaatcaagccgatcaccaccacaaacaggttcgacagctggcccgaatactggcgcagagctggcacgcggcggattgcatacatcggcatcaggaacagcaggcacgcgatgatcggcccgcccatggtctcgatcatgcccaggatgctcggattgaaggtggccacggcccagcaggtgagtaccatgaacagcgcggtgcagcgctccagccatttcgacgacatcgaacggttacgaccgcgcagggatttgacgatcatgccctgaaagccttcgctggcaccgatgtaatggccgaggaaggatttggtgatggccaccagcgcaatcagcggcgcggcgtaggcgatcaccggcgtctggaagtggttggccaggtacgacaggatcgagatgttctgcgccttggctgctgccaggtcggccggcgacagtgccagtacgcaactgaagcagaagaacatcacggtcagcaccatcatgccgtgggcggtggccaggatgccgctgcttttacgctcggcctgggcgccgtacacgcgtttctggtcgacggcgaaggcggagatgatcggtgaatggttgaacgaaaacaccatcaccgggatcgccagccacagggtcttgaagaatatcggcaggggcatgccctcgctggcggaagcgaagaacgcgccgttccagttgggaatcaggctgattgccagcaacagcagcgccgcgacgaacgggtacaccagcacgctcatggccttgacgatcacgccctggccgcaacgcacgatggccatcaggccgaggatcagcaccagcgacaggatcgcccggggcggcggggtcatgtgcagttggtgttccatgaagctgccgagggtgttggtcagcgccacgctgtacaccagcaggatcgggaagatggcgaagaaatacagcagggtgatcagcttgcccgcgccgatgccgaagtgctcttcgaccacttcggtgatgtcgccggatttgcctgacagcacaaagcgcgtcagcccacggtgggcgaagaaggtcatcgggaaggccagcagtgccagcacgatcagtggccaaaaaccgccgacgccggcattgatcggcaggaacagggtgccggcgccgatggccgtgccgtagaggccgagcatccaggtggtgtcatgttgggtccagccggtggtcacggttgcttctacagcagggttttctacggcaggtgtacgtacatcggtcatcgttattgcctcgttattatttttgcgcgggctcacgttggggcaggtagcagtgctccgatcagcactccacccagctgaccgccaggccgccccgtgaagtttctttgtatttgtcatgcatatcggcgccggtatcgcgcatggtgcggatcacccggtcgagggaaatgaagtgtttgccgtcaccgcgcagggccatttgcgtggcgttgatcgccttgacagcggcgatggcgttgcgctcgatgcatggcacttgcaccaagccgccgaccgggtcgcaggtgaggcccaggttgtgctccaggccgatctcggcggcgttttccagctgctcgggagttgcaccgagcacgtccgccaagccggcggcggccatggcgcaggccgagccgacttcgccctggcagccgacttcggcgccggagatggaggcgtttttcttgcacaggatgccgacggcggcggcagccaggaagaaattgaccacatcgtcgtcggacgcgtcggcattgaacttcatgtagtaatgcagcacggccgggatgatcccggcggcgccgttggtcggcgcggtgaccatgcgcccgccggcggcgttttcttcgttgacggcgagagcgaacaggttgacccattccatcgccgacaaggtggaggtgatgacattcggcttgccgatttccaacaggctgcggtgcagtttcgcggctcggcgcggcacgtccaggccacccggcaggatgccttcatcgcgcaggccttgctccacgcattcgcgcatcaccgaccagatatgcagcaggccgctgcgaatatctgcatcgctgcgccatgcgcgttcgttggccatcatcagttcggaaacccgcaggccgtgcttgttgcacaaggccagcagctcgacggcgctggagaagtcgtagggcaattgcacatcgctggtcggcgcaatgccagaggctgcctcggccgcttcgataatgaaaccaccgcccaccgagtagtaggtctgctcgctcagcaggccgttttcaccgtaggcatgcagggacatggcgttgggatggtagggcaggctttcgtccagcagcaggaggtcggtgtgccagttgaaggcaatctcctgttggcctgcgagcaataggcggccggattcgcgcagttgctggatacgggcattgatcgaggtgggatcgacggtgtctggccactcgcccatcaagcccattacgcaggcgcggtcggtggcatggccgacaccggtggcggacagcgagccatacaagcgcacctccacacggtgagtgtggttcagcagttgttggtcgatcagggcctgtgcaaaggtcgccgccgcgcgcatggggccgacggtatgggagctggaagggccgatgcccaccttgaatagatcaaatacactgatagccatgctaaagccttacaagcaatggagtaggaatcgctgccatgttttgtaggacgagcgcaattggcgcgatactgagcctctagcacggcactgaccaacgaattatcctaagacaccctttagcaggactaaacgctatgacccggccccttcatggccagacgtatgtctggctgcacgttttttcctgtgcagcgcggcacctgtcgttcacccgttgcgccgaagaactgcacatcacaccgggcgcggtgagccagcaaattcgtcagttggaggagcgattggggtttcgtttgtttcatcggcgcgcccgtggggtggagctcagtgccgaggggcagcgcctggccgcgacggtgggtgaggcctacggcagcatcgatgccgaattgcagcggttggacgcgggcatgatcagcggcaccctgcgcctgcgctcgatcccgtcgtttctcggcaagtggctgaccccgcgtctgccgcgcctgcagcagcgctttccggatattcagctgcgcatggtcgccgaggacagcagcatcgccctgcacgagggcgacttcgacctggccatcgacttgaatgacggcagttaccccggcctgttatccacagccttgctcgacgagcagattttcccggtgtgcgcgccgagcctgctgcgcggtcgcccaccgttgcatggtccggccgacctggtgcatttcccgctgctgcatgacatcaccgcctggcgtgggagctatgagtatgcggagtgggagttttacctgaatgccatcggctaccacgacgccgatgtgcgccgtggccataccttcaaccgtaaccacctgaccattgaggccgccatcgccggcatgggcgtggccatcgcacggcgtacgttgcttaatgatgagttggagcgcggcaccctgatcgtgcccttcggcctggctgtgcctaaccataaacgctacgtgttgctgtatgcgccgggtgcgctgagccatccgggtgtgcgtgcggtgcatgattggctggtggaagaagcggagatctttcgcggattgcacccgttgggagaggggcaattgtgaggttagctgtgcgtaagaagatgtaactaactccccaccctaacagcgtttttgctcgtagtcagacttaatttgtaatgtgggatttatctttgcaaaggggttgaattgttctgcggactgctcaattgtgtaatcaagaggtcatggtttcaccaccccggtgtcgcagttgtgacctctcgcgagctagctgaaataagggaagaactatgcaaatccaagtcaatagcgataaccatattgaaagcagcatccgactggaggagtgggtacgtactaccattgagagcacgctcgaacgctacgaagaagacctgacccgagtggaggtctacctgcgggatgagaacggcgacaagcccggtccccacgatttgagttgccgcctggaagcgcggccaaaaggccatcagccgctgtcggtgctgcacaaggccgataccctggaacaggcgatcgacggtgcggcgaccaagctggaccatgcgttggaacatctgtttggcaaactgcaaggcaagccgcgcgctgccgggaaaagccagccgaccaccaaagtcaatgaagatgagctagagcaggagtttctggaaaaagaacgtgccgtgttcaacggctgataactttctcacgctccactaagaacgggcctgcatttgcaggcccgttttcatttactgcccgcgtcggaaaaagtaccggctcgatagcgccagcccacaggcacccaaccctgcaaacagcatcgcccagccggcaccatgacgcagtgcggcctgggcctgcgcgacgctcacccccggtacatcgagcttacccgccgcgatgttctggctgatgcccggccaatccagcgccgtggcgcccggcagcacattggccagttgagcgctgatccccagcaacagcaccaaccccatcaacgcgatgttgagcgccagggtaatcagccgtgcgctcaggtcgatgcccgaggccatgccggcgcggtccgccgacaccgagcccgtggtggtgttggtggtgggggagttggtcagtgccaggcccacgccggcaatgatgcaactggccaggatcagcaggatgctgggttgcgccgcccgattggcggcggccatggccaggaaacccgcacccatcaaacccaggcccaacgggatgatgcgctcggcgccgtagcgcagggccaggcgctccgccagcggcggcaccagcagcgtgggcagggtgtaggcgagcagggcgccgccgctggtcagcgtgtcgtagcccaggcccgcctggaaatacagcggcaggtagatcatgaacggccagaagctgaagttcatgccaatggaacccatcaaggcgccattgaagcgctggatgcggaacaccgagaagtcgaacatcgggtgggcgctgcgtcgctcaacgacgatgaacagcagcaacccggccaccgccagcccagcccaaccgagcatgatcggtgtgccaaaaccgttctcggtgccctgggtgatgaaatagaccagcgcgaacactgacagcgtcaaggtgagcataccggcgatgtccaggcggtggctggccgggtcgcgggattcctgcacgctcacgtgcagcagcaccagggtgaacacggtgagcggcacatgcaccaggaacacccagcgccagtccgctaccgccaggatcaatgcgcccaccatcggcccgaagcccaggcccacgccagcgatcacgccccagatcgcgaacgcccgtgcccgcgccgccggttcgcgaaacaggtgcgacagaatcgcgaactggcaaatcatcatcgccccggcgcccacgccctggacgaagcgtgcggcaatcagcgtcggtgcatcgtttgccagcccgcacgccagcgaagccagcccgaacaaccacaggcacagcaccagcatgcgcttgcgaccaaagcggtcggccagggtgccggcggccatcaacacgctggtgcaggccagggtgtaggcattcatgatccattgggcatcctggaaacccgtgcccagttgctgttccagtgtgggcaggatcaccggcacgctggagatctccaggccgaacatcagggcgacgagacacacggcggtgagggcgaggccgtttctggcggagcggggtgggttggcggccgataacgtggcggcgggttgcatgggattctcctgaggttgagggaccgttggattttcaggggaatctgtttctttattcgtgataagttttccgtcaataagggaatcaagagcgacaattaaatcatggccactgcgcgtttcgatggcgttgaactctttttgcagatcgtcgaaagcggcaacctgacggaagccgccgaacgcctgaacctcacgcgctcggcggtgggcaagggcctggcacggctggaagcgcggctggggacttgcctgttgcagcgctccactcgccgtcagcgtctgacggaagacggacaggcgtactacgagcattgcctgcgcgcattggctgaacttgaagccgccgaatcggtgctggaaagcggccggcagcagccacgcggtcgtctgcgcgccagcgtgccgctggccttcgggcaccactatgcggcgcccgcgttgtgggggttgatggaccgttatccggaactggagatcgaggtgtgtttcgctgatcgcatgaccgacctggtgcaggaaggctttgatatcgccgtgcgaatcggccctttgcccgacaccgaccgcttgagtgcacggcgcctgggtgaacagtccgttggactggctgcttcacctgcgtacttgcagcgggtggggcggattgaatcggccgacgaccttgccggccatcgcggcattgcctaccgcagcaacacgccgcaccgttcgcgggttgtgtcgccattggtgctggacgatctccaggccgtggcggacgctgctatcgcgggcgtcggcctggcctggttgcccagttggttgattgcacactatgtgctgcgagggcagttggaagcagtgctacccgcctaccgtgagcaaccctcgccaatccacgtgatctggccaaccgccgcgcatatgccggccaaaacccgctgcgccatcgacgccttggtcgcagctacccccagttgcctggcgggcagttagaagcagacggtgggggatgagcagtgtccattgtggcgagcccgctcgccacaacaaatctgctcaccacagggagtgcttctcgcgcagttagaacgcgatcgaggtctgcacgtacaccgtgcgcggttcgccgacgtacttgcccttgttgttgtcgtcgaacgagcgcgtgtagtactgcttgttgaagatgtttttcacccccaccgccacattcaaatccgacagctgcgggccgaagtcatacgcggcgcggctgctgaacagcatgtagccggggatgcggccattcgcgccgtcggcgctttcggcctgggtgttggcattgtcggcgaactggctgctctggtagctgctgtccaggttgagcttccagcgaccctcggtgtaacccacgcccagggtgcctttgtgcttggacgagaagggcacgcggttgcctttgttcgggccgtcctcgcggatggtggcgtcgacataagcgtaggtggcgtacacatcaaacccggccagtgcagggctcaagccatcgagcgcgtagttgacgctggtctcgataccctggtgacgggtttcgccacgggcgatcaccgagtcgttggtctggttgctttcgtactggttgtcgaagttgatcaggaacgcgccgatttccgcacgcaaggtgccgtcgtcgtagcgggtgcccagttcccaggtacgggctttttccggcttcacttcgccgctggtcacgcggttgggcatctggctgtactgcacgctgccgaacgaaccttcggtgttggcgtagaggttccagttgtcggtgaggtggtaaagcacgttcagtgcgggcaacgcggtgttgtagtcgcctttgtacttgacgtgggtgaggttgttggtttgctgggactcgatcatctcgtagcgcacgcccggggtgatggtccacttgccgatatcaatccggtcgtcgatgaaaaatgcgttggcttcggtgccgccacgggtgtcgcggtcgttgcggctgttggtggtggggatctgctggttggcggcaatcggcgtgcggtagcgcagttcgtggccggcttcgttgatgtagcggtagcccacgcccacttcgtggctggtcgggcccaggtcgaagccttgggcgaagcgggtttccaggccgcgtacccagtactcgcgtggggatagcgagaggaaggtgccctggtccaggtaaccgctgcgcagggtcttggtgaagaagctgtttacggtgaactcgcgacggtcctgctcatagcggtagccgacgttgaacatcgtacggcggccccagaacttgtcgtaggggcgggtggactggtacggatcggccttgtagtccgcaacgttcaacccccctggcatatcggcctggccttcgtagtactgcgccatggcgttgaagctgttggcgtcgtcgagctggtatttgcccttgaggatcaggtcgtcgatgcgcgtgttgctgttctcgcgccagtcgccgccacgggtgccggagtacagcagcgcaccgccaaggccgttgtcggccgtgccgccggccagcaggttgccggtggtcttgaagccgtcatggctggaggaggggctggtttcggtctgcaggccgcctttgacggtaggcgcatccggaatcgcgcgggtcacgaagttgaccacgcccccgacgttctgcgggccgtagcgcacggcgccgccgccacgcaccacgtcgacggcatccatgttgcccatgctgatcggcgcgaacgacagttggggttggccgtacggcgcaaacggcaccgggataccgtccatcagtacggtggaacgcgaggccaggcgcgggttgaggccgcgaatgccgaagttcagcgccatgtcgtggctaccggtgccgttgttgtccggggcgttgacgccggggatgcgattgagcacgtccttggcctgggtggcgccttggcgttcgaacgcttcgcggcggatcacatctcgggcgccggggtgttcgaacacgttggtctgtgctgcgtcgccgagccagtcgccgaccacgctggaggtgcccaactcgatagttgccggtgcactggccggttgcaggctgtaggcgttgtcgccttcggcgcgggcttgcaggccggtgccttccagcagtttctgcaggccgtctgcggcgccatagttacccgacaaaccacggctctgcatacctgcggtgacttgcgagccgaaggaaatcagcacacccgcttcacgtccaaattgattcaacgccgcttccagcgaagtcggcgcgatgtgatacggcttggcatcagccgccatggcgtgtggcagtaccgtaagactcaggctggcgccaagtaggagttggcgcagggtgcgggcgagaagcgtcggttgctggggcatgaagagcggtccttagaaggaaggatcaagggggctttccttctctgtcacgcgaggtgtgcaaaacggctcacagtgtttgaaattaatttcaggcgcgtgcctgtaccgtcacccaataccgcgtgaagcgccgtactttcaccggcaggctcacttccagcaggtccagaatgcgttcactgtcgtccagcgggtagctgccggagatcaacaggttggccacctgcgggtcgcaattgagctggccacgacgataacggccgagttcgccgaggaaatcttccaggcgcatgtgggcggcgaccagcatgccgtcggcccaggcaccgctgttggcgtcggtagggcgcggggtatcccagcctttgcgggtgaagttgacctggcgcgcggcctcgaccgtcagcggcaggccgctgtaggtgttgggcattacctcgacgcggccatcgaataccgccagctgggtgtggtcgttgaactggcgcacgttcatgcgtgccgcgtggctggtaagtagaccctggccggtcaacacgttaagcggtgtgttgccggcgaaaccggtcagcaggatttcgccttcaagcaggcggatcagtcgttgctggccatcgaagtgcacatccactgcgctgccggtattgagctgcaactggctgccatcggccaattgcaccttgcgccgctggccgatggggctgcggtaatcggcggtcagcggcggcaggatatgttgctggcgcaggccccaggcggcggccgaaccggcaccgaggatcaacagcaacttgagcgcttggcggcggctggtggaggttggcgcgttcaacgccgcgtgggccagcggcgagggcatgccgcgcaggcgctggttgacgcgttgcatatggtcccaggcgcgctggtgttcgctgtgggcgttcagccagtgttgccaagcggcctgctggcgtgggttgaggccgccttgctgcatttccatcagccaatgcacggcctgttcggcgacttgagtggagaaggtcatagggcgaaatagcagcgcatggccgctttggtcaggtgacgcttgacggtggcgatggaaatccccaactcagcgccgatttgcgcgtaggtcaggccatccagctgggccagcaggaaggcgcgcttgacctgcacgggcaggccatcgagcagttggtccagctcgaccagggtttgcaggatgattgcgcgttcttcttcggatggcgccacgtgttcgggcatgtgtgccagggcatcgaggtaggcgcgttccaggtcctggcggcggtagaagttgaacagcacgcgcttggcaaccgtggtgagaaacgcacggggctcgaccagcgtgggggtttcccgcgcggtgagcacgcgcatgaaggtgtcctgggcaaggtcagcggcgctttccgggcagccgagcttgcgtcgcaaccagccggtgagccagtggtgatggtcggtgtacaaaacttcgacggtgttggacgggctcaacggggacactccacaagcatcgccatgctttagagaacaagaattgttcgcattgtagggtccgtgaagggcttcggcaatccatccgcgcaggtgattcatccgttctgttttgcttatgagaatatttatcattaatattgcgcgctgatgaacctggcgcctcccgcatgaaaagcaaaacctcgctgcctgtctcctatcgtctcgccgtgacttcgcgcgtgttggctgccgtggtgggcggttacctgatggcgtccctggccagtatctgcctggcgctgtggctgcccacctcccgcgccgatgcggtgatcaccgggatgatgagttccttcgtgttctacctgctggcagtcatctggtgtttcgcctgccgcagcgccgcacgtgcctggttcggcgtgatgctgccaagtgccgcgtttgctaccttggcgggcgtgggcttgtggatgacacgggtatgaaagagggtttccgtcaggcgatggcctggttgcacacctgggccgggctgatctttggctggctgctgtttgcgattttcctgacaggcaccctgtcgtatttcaaggacgagatcagccactggatgcagcccgaagtgcaggcccgtcccctggacgatgcacgcagcctcaccgtcgcccaaacctatctgcagcaggtcgcacccaccgccgctcgctggttcattaccttgccggatagccgcgatcccggcctgtcggtgatgtggcaggacaaagtcgaccccggcaagcgtggcaacttcatccagaaaaccctcgaccccgtcaccggccaggccgtgcaggcccgtgaaagcatgggcggcgagttcttctatcgtttccatttccagctgcaaatgccttacccgtggggccgctggctgtcgaccatcgccgcgatggtgatgttcatcgcgctgatcaccggcatcatcacccacaagaaaatcttcaaggacttcttcaccttccgcccccgcaaaggccagcgttcctggctcgacgggcacaacgcggtgggtgtgctggtgctgcccttccatctgatgatcacctacagcagcctggtgatcttcatgagcatggtgatgccggcgccgatcctggcttcctacggcaacgaaacccgcgcctttttcagcgaggtgttcccgaataccaacaacgcccctgcattgggccagccagccacattgctgccgctggtaccgatgtacgagcaggcgcgggcgcagtgggcgggtgggcatgtggggcgtgtggcggtgaataaccccagcgatgtgaacgcctcggtcaatgtgttccgcgcaggttccgacagcgtggtgcacgatttcggcagtaccgtgtccttcaatggcagcaccggtgaactgttgcgagtgagtggcgggcagtcgctgccggctgccatcggcggcagtttctatggcctgcacatgggccatttcgccggcccggtgctgcgctggttgtactttatctgtgggttggcgggcacggcgatgatcggcaccgggctggtcatctggcttggcaagcgccagctcaagcacgccaaggccggcgtgatgccctttgagttgcgactggtggaagtgctcaacattgccagcatgtccgggctgatgatcgctatcgcggcgttcttctgggccaaccgcctgctgccggtgagcttcgccgagcgttccgactgggaagtgcagaccttctttattgcctggggcctgagcctgcttcacgccatcctgcggcgtggccgccagggctgggtcgagcagttgagcgtcggcgcattgctgtttattgccattccattgctcaacgcgttgaccacctcgcatcacctgggcgtttcattggccaccggcgactgggccatggccggcttcgacctgacgtgcctggccagcggcgtgttcctcggctgggcagcctggaagatgcagcaccgcaccgtgcctgcgcccaaggccgaacgtgcacgcgggttgacgctcaagcaggaggcgaactgaatgctactggcgctgctgatgtgctacgtcgggttcaccgcattgtgcttatccaccgaccgtcatcacggtgagttgctgcacagcaaactctcgtcccgtcggcgtacggggttgcgtgtggccgggtggttgctgctgaccgtgtcgatctggcccgccgtggccatcgccggttggggccagggcctggtggagtggtgcgccgtgttgatgctcagcgcattgctgctggtgttgctgttgccatataggccaaggctggccttgatcctggcgggtgtcggcctgctcgccagccctgttgcagccttcgccaccctctgagcccacccatgatgatcagcaccccacccgaaccccaggacagccagcacgctgacgcggccggtgggcgtgcgcatttcctgcaggtgttcctgtcccagcgttcgcagatggaggccctggtgagtcgccgcgtggggtgccgcgcgacggcggcggacctggtgcaggacctgttcctgcgcttctggcgccggccgctggtgcaggtcgaagaactcagtacctacctgttgcgctgcgccggcaatatcgccatcgatcacttgcgcagcgaaggcgcgcgagtgcgcagcaacgaaggctggctgcccgaacagcaggacaaccaaggctccgagccccaggcggcgctggaagctggcaatgatctgcgccatgtcgaagcggccctgcgcagcttgcccgagcgcacgcggcagattttcctgctcaaccgcatccacggccgcaagtacgcagaaatcgccaaggccatgggcctgtcccaaagtgccgtggaaaaacatatgatgcgtgccctcgaagcctgtaaagccagccttcgcgacccctcatccccacgcacgccagggaaagcaccgtgaacgtcacccccacgcccgcccaggaacacgccgcactggcctggctgagcctgttgcatgaccagccgagcagcggtgaccaggccacgttcagccgctggctgcgggccgatcctgcgcatgtcgaggcgtatgcccaggcccaggtgctgtgggagttgagcgaagttccggcgcgaaggctggcggacgaagaagccatggccttgcagggctacctcaatgcgatgaacacctcgaagcgttcgcgggtggtgcgttggtccggggcgttggccatggctgcgtgcctgttggtgatggtgtccatgggcgccggctggcagccgtcgcggtgggtcgatgactttggtgcggactacgtgacggcgcccggggaaatcaaaaccgtcacgctggctgacaaatcccaggtcaccctggacgctgacagcgccatcgctgtggatttcaaccatggtgagcggcatatccagttgcgtcgcggcgccggttttttcagcgtgacccataccggtgagtcgttcgtggtggaggcgggcagcggtgaagcgcgggtgctgggtactcagttcgaagtgcgcctgcaaccggcaggcgcccaggtaacggtgttgtccgggcgggttggcgtgacgccgtcaaagcaggggcaacagcagattcttaccgccggccagcaagtggcctatgccgatggcaatgccgaaccgatgcatggggtcgacagcgaatcacgcctggcctggcgcgacggctggctcaactactacaaggcgccgctggcggacgtggtgaaggacctgggccgttactaccccggtcgcatcctgttgctcaacgacgagatgggcgccaaacgcgtcagcggcagcttcccgagcaaggacccactggcggtgctgaatgcgttgcaggcggtgctggggtttgaacagcaccacgtgctggggcgcatgatcgtggtgcgctgattacttcagcgctgccatgatcttctccgggctgtactcgcgaatcagcgagccgttcacgtccacaaacggaatcccaccaccgcccaacgcctcatacgccttgcgcgcctgggcgtccttctcgatatcgaacgcctggtaagggatgcctttctggtccaggaaacggcggatctgcttgcagtacccgcaccactcggtggcgtagagcgccacgcgcgccttcgcccgcgtctgctctggcaccacctgcgatgggttgaacacccgctcgatcttgccccagttctggatcaccaccaccaccagcaataccagcaggactttcttgaagaccccgccgagcatcagttacggcgcttgagctggtcggtcagttgggtcggcaggcccttgatgatcaaggtgccggcggcttcgtcgtactcgatcttgtcgcccagcaggtgtgcttcaaagctgatggacaggccctcggcgcggccggtgaagcggcggaactggttgagggtgcgtttatccgccgggatctccggtgacaggccgtagtccttgttgcggatatggtcgtagaacgcctttggccgatcttcatcgatcagccccgagagttcttccaggcccatgggttcgccaagcttggcctggctgctggcgtagtccaccagggtcttggttttttcgcgggcggattcgtccggcaggtcttcgctctccacgaagtcactgaacgccttgagcaaggtgcgggtttcgcccgggccgtcgacgccttcctggcagccgatgaagtcgcggaagtattccgacaccttcttgccgttcttgcccttgataaacgaaatgtactgcttggactgcttgttgttctgccactcggacacgttgatccgcgccgccaggtgcagttggcccaggtccaggtgacgggacggggtcacgtccagctcgtcggtcaccgccacgccttcgctgtggtgcagcagggcgatggccaggtagtcggtcatgccctgttggtagtgggcgaacagcacatgcccgccggtggaaaggttggactcttccatcagcttctgcaggtgctcgaccgccgtgcggctgaaggtggtgaaatcctgcccgccgtcgaaatactccttcaaccagccgctgaacgggtgcgcgcccgactcggcatggaagaaaccccaggccttgccttgtttggcgttgtagctctcgttgaggtcggcaagcatgttctcgatggcggccgactcggcaagctcggagtcgcgggcatggagaactgcgggtgtgccgtcgggttttttgtcgatcaggtggacgatgcaatgacggatcggcataggcttctcggctggttgagaggggagcggtgggcctccccgaaaagtcgccaagtgtaccgcaccattggccaagacgtgcttcgaagggtgttttgggcagcttccgacggggcatatgcctttttttcacggtttagagcgataaagctgaccaaatgggtaggtagaggcggatatttccccgtctctgtgctagttttgccccgtcttacgccaagtctcggcgataagcgtgcattcagcatctgtcaggtcgaaccaatccccgtttcaagcatctataaccccgatctccgtggttataagcctggggtgccagaccatgacggtcgggctcgacggctgacactgcactctgcaatccatatgaatttgatagggaaggaacaccacaatggctattactaaagaccaactgatcgctgacctggctgaagcagtagacgcaccgaaaactaccgtgcgcgctctgctggaccaactgagccatgttgttgctgaccagctggaaaacggcggcgaaatcactctgccaggcgttggcaaactgaaagtgaccgagcgtcctgcccgtactggccgtaacccttcgactggcgctgccatcgaaatcgctgccaagaaagttatcaagctggttgtggccaaaggcctgaccgacgctgttaacaagtaagacgcagcaaaaaaaaccgtgcttcggagcgatccgggcacggttttttgttgcctgcgatttgtgtctagcgcacccagcgctggcgccagatctgttgctcgttcttgctctggaaggtccaggctacaaagcggctctgcttctgcccctgggacatttccaccacctggctttccagcacgccggcttttttcagggctgtctcgatcgcgggcaagttcgacgcttttgacaccaggcaactgaaccacaacaccttgtgggcaaaatgcgcactttcagcgatcagttgcgtcacaaagcgcgcttcgccaccttcacaccacagttcagccgattggccaccaaagttcagcaccggcaacttgcgcttgggatcggccttgcccagggcgcgccatttgcgttcgctgcccttggtcgcttcgtccatggacgcatggaacggcgggttgcacatcgtcaggtcgaagcgctcacccggctccagcaagcctagcaggatctgcttggggttggtttgctggcgcaactggatgaccttgctcaggtcgttggactgcacgatggccttggctgcggccactgcgatagggtcgacctcggagccgaggaagttccagcggtattccatgtagccaatcagcgggtagacgcagttggcgcccatgccgatgtccagcaccttgacgatcgaaccgcgcgggatcttgccgtcattggtgctggccagcaggtcggcgaggaagtgtacgtagtccgcacgccccggcactggtgggcacaggtagtcggccggaatgtcccagtgctggatgccgtagaaggctttgagcagcgcacggttgaacacgcgcaccgcatccgggctggcgaagtcgatactttccttgccgtacgggttgatgatcacgaattgcgccagttccggcgtggtcttgatcagcgccgggaagtcgtagcggcctgtgtggcggttgcgcggatgcagggtggcctctttgcgcggcacaacgggcttggccgtggctgcggttttaggcttcttgcgcggaggttttggcgtgctgggggcggtcatgatgattctggtgttggctcaaagtggtgggcattgtcacacatcctgagcctgtcccggtcaaatgtgggagggtgcttgcccccgatggcggtgtnnnnnnnnnnnnnnnnnnnnnnnnnacaccgccatcgggggcaagcaccctcccacattggccgcgtgtacaggcgtttcagacaaaaaaagagacccgaaggtctctttttctacacgactcacaccttacaggctggaaatccgcgcatgttgctccgccagcttgcccagggcctgttcggcctcggccagcttggcgcgttccttctcgatcacttcagccggcgctttgtcgacgaacgccgcgttggacagcttgccgcccacccgctgcacttcgccttgcaggcgtgcgatttccttgtcgagacgggccagttcggcacccttgtcgatcaggccggccatcggcaccagcacttccatctcgccaaccagtgcggtcgcggacagcggtgcttcttcgccggttgccaatacggtgatcgactccagcttcgccagcttcttgagcagcgcatcgttctcggcgagacgacgcagatcctcggcgctggcgttcttcacaaacaccgccaatggcttgcccggcccgatgttcatctcggcacggatgttacgcgtacccatcatcagggtcttgagccattcgatatcgctttcggccgcttcatcgatgcgcgcttcgttggccaccggccaaggttgcagcatgatggtcttgccttcgataccggccagtggcgccaggcgctgccagatttcttcggtgatgaacggcatgaacgggtgggccaggcgcaacgccacttcgagtacgcgcaccagggtgcgacgggtgccgcgctgacgttcgatcggtgcgttctcgtcccacaggaccggcttggagagttccaggtaccagtcgcaatactggttccagatgaactcgtacagggcctgtgcggccaggtcgaaacggaactggtcgagctggcgggtcacttcggcttcggtgcgttgcagttgcgagatgatccagcggtcggccaggctcagttcgacggcttcgccgttctgaccacagtcttcgcctttatccagcacgtagcgcgccgcgttccagatcttgttgcagaagttgcgatagccttcgacgcggcccatgtcgaacttgatgtcgcgaccggtagacgccagcgagcagaaggtgaaacgcagggcgtcggtgccgtagctggcgatgccatcggcgaactcgtcgcgggtctgcttctcgatcttcttcgccagtttcggctgcatcaggcccgaggtgcgtttctgcaccagggtttccaggtcgatgccatcgatgatgtccagtgggtccaggacgttacccttggacttggacatcttctggccctggccgtcacgcaccaggccgtgcacgtacacggtcttgaacggtacctgcggggtgccgtcctcgttcttcaccaggtgcatggtcagcatgatcatccgggcaacccagaagaaaatgatgtcgaagccggtgaccagtacgtcggtggagtggaatttcttcaggaattcggtctgttgcggccaacccagggtggagaaggtccacaggcccgagctgaaccaagtgtccagtacgtcgttgtcctgttgcagcgcaacgtcggggcccaggttgtgcttggcgcgcacttcggcctcgtcacggcctacatagaccttgcccgactcgtcataccaggccgggatgcggtggccccaccagagttgacggctgatgcaccagtcctggatatcgcgcatccacgagaagtacatgttttcgtactgcttgggcacgaactggatgcggccgtcttccacagcggcaatcgccggttctgccagcggcttggtggacacgtaccactggtcggtcagccacggctcgatcacagtgccggagcgatcgcccttcggcactttcaggccgtggtcgtcaacgctcaccaacaggccggcggcgtcgaaggcagcaacgatctgcttgcgcgcttcaaaacggtcgaggccggcgtattcagccgggatcttgccgtcgatgctctcgttcagtgtgccgtccaggttgaacacctggcaggccggcagaacggcggcgttcttgtcgaagatattcagcagcggcaggttatggcgcttgccgacttcgtagtcgttgaaatcgtgggccggggtgattttcacgcaaccggtgccgaattcagggtcgcagtagtcgtccgcgatgatcgggatacggcggccaaccagcggcagttcgacaaacttgccgatcagcgccaggtagcgttcatcgttcgggttaaccgccacggcggcgtcgccgagcatggtttccggacgcgtggtggcgacgatcaggtagtcgttgccttcagcggtcttggcgccgtcggccagcgggtacttgaggttccacaggaagcctttctcgtcgtggttttccacttcaaggtcggaaatcgccgtgtgcaacttggtgtcccagttgaccaggcgcttgccgcggtagatcaagccgtcttcatgcaggcgcacgaaggcttctttcacagattccgacaggccgtcgtccatggtgaagcgctcgcggctccagtctacggacgagccgagacgacggatctgacggctgatattgccgccggactgatccttccattcccagatcttttccaggaatttctcgcggcccaggtcgtgacggttctggccggtggcttcgagttggcgttccaccagcatctgggtggcgataccggcgtggtcggtgcctggctgccacagggtgttgcggccctgcatgcggcggaaacggatcagtgcatccatgatcgcattgttgaagccatggcccatgtgcaggctgccagtgacgttcggtggcggaatcatgatggtgtaggaatcgcccgcgccttgcggggcgaaataattctcggattcccaggtgttgtaccaggaagtttcgatggcgtgcggctggtaggtcttatccatgcgcggcgggaccctagttggcatttattcaggaaagccggcaagtataacggggctgggagctgagggcgagttgaagacttgtgcaaatcaaaggtgggaggcttgtcccctcccacaggaagtttatgcaaggctcaggactggtattggctgagcagccgctccatccgcgcatccagccggcgcttgatctcggtttcgatatgcggggcgaagtcgtcgatcacgtcctgcatgatcagttgtgcggcggcgcgcagttcgttgtccaggtgcagtagcagggcgtcgggccctttttcagcgggggcaggttcgacggagggagcttcgacaaccggctccggcgcgacaggtttgccgccgaccatgtcgaacagcagcggaatctgtacctcgccatcgaccgtctcggtcaacagcggcggttgcaagtcatcatcacccagtaactgacggatcgactccaggtcgtccagcaggtggtcgtcttttttctgcgggtttggcgtgtccatcatttactcaaagtcgttgtagccggtgatcctggagaggatagccctgttcgcggtagaaacggaaactctcccgcgcggcctgacgaatagccggatcttccaccaccacctctgccacacgggcaaaagccttggcgaatggcggtactttcaggtccaggttgaccagcaggtcatggtgatcgccgcaactgtcacccaaacccagcaccaccaggccttcaggttcagactcggcggggccgtggggtacgaagctttcgcccttgaagcgccacaggcgggcatccagctcatcgcgttgggcggcatcgctgcaatgcaggtagatgcggtggcccatgcgccaggctttttcggtgagtttgcaggcaaagtccaggcgcgcgagcggatcggcgctgggcaatatatagaagtcgacttgggtcattgcggttcctgagaccgaggcgacgtaagagtcgcctcggaatcttcagtttcaggccttggcgcgatccagcaggtactgggtcaacaatggcaccggacggccagtggcgcccttgtccttgccgccgctggtccaggccgtgccggcgatgtccaggtgcgcccagttgaagttcttggcaaagcgcgacaggaagcaggccgcagtgatggtgccggcttttggaccaccgatgttggcgatgtcggcgaacgggctgtccagctgttcctggtactcatcgaacagcggcagttgccaggcgcggtcgtcggcggctttaccggcgctgagcagttgctcgatcagctcgtcgctgttacccagcaggccggaagtgtgggagcccagggcgacgatgcatgcgccggtcagggtggcgatgtcgatcacggcctgtggcttgaagcgctcggcgtaggtcagggcatcgcacagcaccaggcggccttcggcgtcggtgttgaggatttcgacggtctggccgctgagggtggtgacgatgtcacccggacgggtcgcgccgccgctcggcatgttctcggcacaggccaggatgcacaccaggttgatcggcagcttgagttccagcacggcacgcagggtgccgaacacgctggcggcgccgcccatgtcgtacttcatctcgtccatgcccaggcccggcttgaggctgatgccgccggtgtcgaaggtgatgcctttacccaccagggcgtaaggcttctcggacttcttgccgccgttgtattgcatcacgatcaggcgtggcggctggtcgctgccttggcccacggcatagaacgagcccatgcccagttccttgatcttcttctcgtccagcacttcgactttcaggcccttgaactccttgcccagcgccttggcctgttcgccgaggaacgtcgggtggcagatgttcggcggcaggttgcccaggtcacgggtgaacgacatgccgttggcgattgcagtcgcgtgggtcacggcgcgctcgacttcagcctgggcggccttgatggtcagcagggtgattttcttcagggcacgcggttcggccttggtgctcttgaactggtcgaagatatagccgccgtccaccaggctttcggccagcaggcgggtcttgccgtagctgtcacggcctttgaccacgatttcatcgagggccagtgcggcatcagtgccacccaggcccttgagggtgttgaggatgccgctgatgatcttgcggaacgggcggtcgcccagctcggcatccttgcccacgcctaccagcaatacgcggtcggccttgaggttgggcaggctttgcagcagcaggctctggccgactttgccggccaggtcgccgcgcttgagcactgcgctgatagcgccgccgctgagttcgtcgagttgcttggcggccacgccgagcttgcggccttcgccgatggcgaccacgagggtggcggttttcaacgtttcggggctaacgctttttacaaccagttccattttcgggtcccttataaaggtcggttagccaggagtctgtactccggctttaataccaggcagctgtgtaaaccgccggcgacaaaggccgcagtttgaacctcgccgacggagcctgacaacccttggtgcacgctttgtgcgtgtgcacgagcaagctccgtgacaggcgcggtcaatcacaggataatgcgccatctttttagccggccctgtataaacgggctgtctcggtatgcttgcttgtttggccgccttagcctgacaaccctggagtgtctggtttgattgtcttccgttatctgtcccgcgaagtcctgttgaccctgagtgccgtgagtgcggtgctgctggtcatcatcatgagtggtcgtttcgtcaaatacctggcccaggctgcctccggcgccctggacccgggctcgctgttcctgatcatgggcttccgcctgccgggcttcttgcagttgatcttgccgttgggcctgttcctcgggatcctgctggcctatggccgcttgtacctcgaaagcgaaatgaccgtgctctcggccaccggcatgagccagcagcgcctgctgggcatgacgatgatcccggccgccggcatcgcgctgatcgtggcctggctgagcctgggcctggcgccccagggcgccttgcagttccagttggtgctgaacaagcaggatgcgatgaccgagttcgacaccctcgagcccggtcgtttccaggcgctcaatgacggttcccgggtgacctacaccgaaaccctgaccgacgaccgcgccaacctgggcggtgtgttcatctccgagaaacgcctgggccaggacaagaaagaccggggcatttccgtgctggtggccgattcggggcgccaggaagtgcgtcctgatggcagtcgctacctgatcctggagaatggctaccgctatgacggcagcccgggcatggccgattaccgcgcgatcaagtacgacacctatggcgtgatgctggctcgcccggacatcagcgacgaagtcactgaccgtgatgccatcccgacgactgacctgtggggcagtaaggaactgcgctccgttgccgagctgcaatggcgactctccctgccgctgctggtgttcatcgtgaccttgatggccgtgccgctgtcgcgcgtcaacccgcgtcagggccgattcctcaagctgttgccggcgatcctgctgtacatggcttacctgaccatcctgatttccgcccgcggctccctggagaagggcaagctgtcgccgaccctgggcctgtggtgggtgcacgggatcttcctggtgatcggcctggggctgctctactgggaaccgatccgtttgaaaatgatgagccgtcgcggccagaaggagttggctcgtggctaagctcgatcgctacattggtagcagcgtactgatcgccatcctggcggtattgggcatcatcctcgggctggcgtcgttgttcgccttcatcgatgaagtgggcaacgtcagcgacacctacaccgtgtgggacgtgctgagctatgtggccctcaccgcgccgcgtcgcctctacgacatgatgccgatggccgcgctgatcggctgcctgatcggcctgggcagtctggccagcaacagcgaactgaccatcatgcgcgccgccggcgtgtccatcggtcgtatcgtctgggcggtgatgaagcccatgctgctgctgatggcctgcagcgtgctgatcggcgaatacgtcgcgccaccggccgaaaccactgcccaggccaatcgcgccctggcccaggggtcgggcgatgcgcaaagctccaagcatggcctgtggcaccgccagggcgatgagttcatccatatcaacgcggtgcagcccggtggcctgttgattggcgtgacccgctacacgttcgacaaagaacgtcacctgctggaatccagcttcgccaaacgtgcgcagtacagtagcgaaaaatggcaactcagcgacgtcaccacgacctacttccgtaatgtcggccaaggcaccaaggccagcactgaagtgatcaacgtgccgagcgaggagtgggacatcgccctcaagccggaactgctcaataccgtggtgatgatcccggaaagcctgccgatctccgggttgtggggctatatccactatctgaaggaccagggcctgaacaacggccgctactggctggcgttctgggtcaaggtgttgcaaccggtggtgaccgccgcgttggtgctgatggcgatttccttcatctttggcccgctgcgttcggtgaccctgggccagcgcgtattcacgggggtgctggtgggtttcaccttccgcatcgcccaggacctgctgggtccgtcgagcctggtgttcggcttctcgccgctgtttgcggtgctggtgcccacggccatctgcgccctggcgggcttctggttactgcgtcgggccggttgataccgcgcttatgatcaaaaaatgccctggtcgagagatcggggcatttttgttctggtcagcaaagatgacgtctggcctgagcatcaggtacaattcccggctatttttcagcgggcaatctgcctgcagcctttttgagtgttgatccgtgagtgatttgagtcatatccgcaatttctccatcatcgcccacattgaccatggcaagtcgacgctggccgaccggttcatccaaatgtgcggtggccttgccgagcgtgaaatggaagcccaggtcctggactccatggacctcgaacgcgagcgcggcatcaccatcaaggcccacagcgttaccctgtattacaaggccaaagacggtatcacctaccaactgaacttcattgacaccccgggccacgtcgacttcacctacgaagtcagccgttccctggcggcctgtgaaggtgccttgctggtggtggacgcaggccagggcgtggaagcgcagtcggttgccaactgctacaccgcgatcgagcagggcctggaagtcatgcccgtgctgaacaagatcgacctgccccaggccgagccagagcgcgtcaaggaagagatcgagaagatcatcggcatcgacgccaccgacgccgtcacctgcagcgccaagaccggcctgggtgtcgacgaagtgctcgaacgcctggtgcacaccatccccgcgccgaccggcaactacgaagatccgctgcaagcgttgatcatcgactcctggttcgacaactacctgggcgttgtctccctggtgcgcgtgcgtcatggccgtgtgaagaaaggcgacaagatcctggtcaaatccaccggcaagatccacctggtggacagcgtcggtgtattcaaccccaagcacaccgcgaccgttgatctgaaagccggtgaagtaggcttcatcatcgccggtatcaaggacattcacggtgcaccggtgggggacaccctgaccctgagctccacgccggatgtcgacgtgctgccgggcttcaagcgcatccagccgcaggtctacgccggtctgttcccggtcagctccgacgacttcgaagacttccgcgaagccctgcagaagctgaccctcaacgactcgtcgctgcagtacaccccggaaagctccgacgccctgggtttcggcttccgttgcgggttcctgggcatgctgcacatggaaatcatccaggagcgcctcgagcgcgaatacgacctggacctgatcaccaccgcgcccaccgttattttcgagttgttgctgaaaaccggtgaaacgatttacgtcgacaacccgtccaagctcccggatctgtcggccatcgaagacatgcgcgagcctatcgtgcgggccaatatcctggttccgcaggagcacttgggcaacgtcatcactttgtgtatcgaaaaacgtggcgtacagcgcgacatgctgttcctcggtacccaggtccaggtgacctacgatatgccgatgaacgaggtggtgctggacttcttcgaccgtctcaaatccaccagccgcggctatgcttcgctggattaccatttcgaccgttaccaatcggctaatctggtgaaactggatgtgttgatcaacggcgacaaggtcgatgccctggcactgatcgtgcacaaggacaacgcgcactacaaaggtcgccagttgaccgagaagatgaaagaactgattccgcgccagatgttcgacgtcgcgatccaggccgccattggcgggcagatcattgcacgaacctccgtcaaggcactcagaaagaacgtactggccaaatgctacggcggtgacgtaagccgtaagcgcaagctgcttgagaagcaaaaggccggtaaaaaacgcatgaagcaagtaggtaacgtggaagttccacaagaagccttccttgcggtgctcaggttggatagttaggtcctatgtcgctaaatttcccgctgttgctggtcatcgccgttgccgtttgcggtctcctggcgttgctcgatctggtgttcttcgccccgcgtcggcgggcggctatcgcggcctatcagggcagcgtcagccagcccgatggcgtggtgatcgagaagctgaacaaagagcctttgctggttgaatacggcaagtcgttcttcccggtgttgttcatcgtgctggtgctgcgttcgttcctggtagagccgtttcagatcccgtcggggtcgatgaaacctaccctggacgtgggcgacttcatcctggtgaacaaattttcctacgggatccgcctgccggtgatcgacaagaaggtcatcgaagtcggtgacccgcagcgcggcgatgtgatggtgttccgctacccgagcgacccgaacgtcaactacatcaagcgtgtggtaggcctgccgggcgacgtgattcgctacaccagtgacaagcgcctgttcatcaacggtgagtcggtggccgagaagctgctgggttccgagccgaacagcctgggcagcgccgagctgtaccaggaaaaactcggtgcggtagagcacgagatccgcaaggaaatgagccgctaccgtgcacagcctgacggccagtggaccgtgccggccgggcactacttcatgatgggcgacaaccgcgacaactccaatgacagccggtactgggatgaccccaacattcccaaggacctgctgggcatggttcccgaccagaatatcgtcggcaaggcctttgcggtctggatgagctggccggaacccaaactcagccacctgccgaacttctcgcgggtcgggctgatcaagtaatacaggcggcgctgtgaacacagcgccgaatgcttttctggggtggggacaaatcggtcctgcctcatgcagcaccaaccaggatttgaatttgaacactgcgtcaatcgtcgatggccgccggtgccaccaactagatatggataaaccgtgaccgtttctctagcacgtctcgagcgccagctcggctacaccttcaaggaccaggaattgatggtccttgccctcacacaccgcagctttgccgggcgcaacaacgagcgcctggaattcctcggtgatgccatcctcaacttcgtcgccggtgaggcgctgttcgagcgcttcccccaagcccgtgaaggtcagctgtcgcgcctgcgtgcgcgcctggtgaagggcgagaccctggccgtgctggcccgtggctttggcctgggcgagtacctgcgcctgggttccggcgagttgaagagcggcggtttccgtcgcgagtcgatcctggccgatgcccttgaagcgctgatcggtgcgatctacctcgatgccggtatggaagccgccaaggaacgcgtcaccgcctggctgacctccgagatcgagagcctcacgctggtcgacaccaataaagaccccaagacccgcctgcaggaatttttgcagtcccgcgggtgcgaactgccacgctacgaagtggtggatatccagggtgagccccattgccgcgtgttcttcgtggaatgtgaaatcaccttactgaacgaaaaaagccgaggtcagggtgtgagccgccgtattgccgaacaggtagcggccgccgcagcactgattgccctgggcgtggagaatggccatgactgattcaaccgcaacacgctgtggctatgttgccatcgtcggccgcccgaacgtgggcaagtccacgctgctcaaccacatcctcggccagaagctggcgatcacctcgcgcaagccgcagaccacccgccacaacatgctgggcatcaagaccgaaggcagcgtgcaagcggtgtacgtcgataccccgggcatgcacaagggtggcgagaaggcgcttaaccgctacatgaacaagaccgcttcggcggcgttgaaagacgtcgacgtggtgatcttcgtggtcgaccgcaccaagtggaccgacgaagaccagatggtcctcgaacgtgtgcagtacgtcaccggtccgttgatcgtcgcgctgaacaagaccgaccgtatcgaagacaaagccgagctgatgccgcacctgagctggctgcaggaacaactgccgaacgcccagatcatcccgatctcggcccagcacggccacaacctcgatgccctggagcgcgtgatcgccgagcacctgccggagaacgaacacttcttcccggaagaccagatcaccgaccgcagcagccgcttcctcgccgctgaactggtgcgcgagaaaatcatgcgccagatgggcgcggagctgccgtaccagatcaccgtggaaatcgaagagttcaagcagcagggcaagaccttgcacatccatgcgctgatcctcgtcgagcgtgacggccagaagaaaatcatcattggcgacaagggcgagcgcatcaagcgcatcggcaccgaggcgcgcaaggacatggaattgctgttcgattccaagatcatgctcaacctgtgggtgaaggtgaagggcggctggtccgatgacgagcgcgcactgcgctccctgggctatggcgacctgtaaggtcctgaatgcaccgcagggctgaaaatgtgggagggggcttgcccccgatagcggtgggtcagttgacaaataagtgactgacacactgccatcggggggcaagccccctcccacattaggtttgtgtcgttttcaaaagtgcattccagcagtgagcagccatgtcccaatccccaccccccagccaactcgcctacgtcctgcacagccgcgcctaccgcgagaccagcgccttggtggacttcctcacgccccagggccgcctgcgcgcagtcttgcgcagtgcgcggggcaaggcgggcacgctggcgcggccgttcgtggccctggacgtggagtttcgcggcaagggcgagctgaaaaacgtcggccgcatggaaagcgtgggcacctcggcctggctcaacggcgacgcgctgttcagcggcctctacctcaatgaactgctgatccgcctgctccccgccgaagacccgcacccggcagtcttcgatcactacgccgccacactgttggccctggccgaaggtcgtcccttggagccgctgctgcgtgcgttcgaatggcgcctgctcgatgacctgggctacggcttcgaactggtcaacgacctgcacggcgagcccatcgccgccgatggcatgtatcgcctgcaggtggacgccggcctcgagcgtgtgtatctgctgcaacccggcctgttccagggcaccgagctgctggccatgagcgaagcggactggacggcgcccggcgccttgtccgccgccaaacgcctgatgcgccaggccctggctgtgcatttgggcgggcgcccgctggtcagtcgcgagttgtttcgaaagccctgacaaccccgtgtatgctgtgcggcgtttctttcccttttcaggagcgcttccgtgaccaccagcaatcgcattcttcttggcgtcaacatcgaccacgtcgctaccctgcgccaggcccggggcacccgttaccctgacccggtcaaggctgcgctggacgccgaagaagcgggcgccgacggcatcaccgtgcacctgcgcgaagaccgccgccacatccaggagcgcgacgtgctgctgctcaaggatgtgctgcaaacccgcatgaacttcgaaatgggcgtcaccgaggaaatgatgcagttcgccgagcgcatccgcccggcgcacatctgcctggtgcccgaaacccgtcaggaactgaccaccgaaggtggcctcgacgtggccggccaggaagcgcggatcaaggccgccgtggagcgcctgtcgaagatcggcagtgaagtctcgctgttcatcgacgccgacgagcgccagattgaagcttcgcgccgtgtcggtgcaccggccatcgaactgcacaccggtcgttacgccgacgccaccacccctaccgaagtggctgacgaactgcaacgcatcatcgacggtgtgagttgcggcctcaaggaaggcctgatcgtcaacgccggccatggcctgcactaccacaacgtcgaagccgtggccgcgatcaagggcatcaatgagctgaacatcggccatgcgctggtggcccatgcgctgttcgtcggtttcaagggcgcggtggccgagatgaaagccctgatcctggccgccgccaagcactaaaaaatactgaagatccaatgtgggaggcggcttgccccttcccacatgcgaacccttactgtttagccgttgcaggtgtatcgtatctgccctttgcaggccttgggcctgcggccgatacgtgaggttgttgtgtcccgatccttttcccgtcgacaaatcctgggtggtcttgcaggcctggccgtagtgggcgtcggtgccggtggcgcctatcgctactggctggggaaagtcgccgaagccgaggctgggcatgattacgaactgatcgccgcgccgttggacgtggagttggtgccagggcacaagacccaagcctgggcattcggcccctcagcgccgggtaccgagttgcgggtgcgccagggcgaatggctgcgggtgcgtttcatcaaccacctgccggtcgccaccaccattcactggcacggtatccgcctgccgctggaaatggacggcgtgccctacgtctcacaattgccggtactgcccggcgaatacttcgactataaattccgcgtgcccgacgccggcagctactggtaccacccccacgtgaacagcagcgaagaactcggccgtggcctggtcggcccgttgatcatcgaagagcgcgaacccacaggttttaagcacgaacgcaccctcagcctgaaaagctggcatgtggatgaggagggcgctttcgtcgcgttcagtatcccgcgtgaggccgctcggggcggtacggcagggcgcttgtcgaccatcaacggcgtgtcccaggcggtgatcgatttgcccgccggtcagattacccgcgtgcggttgctcaacctcgacaacaccctgacctatcgcatcaacattccagacgttgaagcacagatctacgcgctggacggcaaccctatcgagccacgcccactgggcaaggaatactggctgggcccgggcatgcgcatctgcctggcgatcaaggcaccgccggcgggcgaggagctgtcgatccgcaacggcccggtacggctcggcaccttccgttcggtcgccagcaccgatgcgcccagcgaatggccgtctgcgttgcctgccaacccgatcagcgagccggacctggccaatgccgagaaactcaacttcaatttcgagtgggtgggttcggtctcggtcgacgccgacaacggcaagccacccagcctgtggcagatcaacggcaaggcctgggacatcaccgacaagacctgcgccgatcgtccgattgccaagctggagaagggcaagagctacattttcgaattgaagaacatgacccagtaccagcacccgatccacctgcacggcatgagcttcaaggtgatcgcctcgaaccgccacaaggtgatcccgtatttcaccgatacctacctgctgggcaagaacgagcgtgcccgcgtggcgttggtggcggataacccaggcgtctggatgttccactgccacgtgatcgaccacatggaaaccggcctgatggccgccatcgaggtggcgtgatgcgacagatccgccccaccgcgatcatcgaccgcagccgcgaccaggactttatgcgcgaagccctggccctcgccgcccaaggtgctgcgctgggtgaagtgcccgtcggcgcggtgctggtgcaggacggtgagatcatcggccgcggcttcaactgcccgatcagcggcaacgaccccagcgctcacgctgagatggtcgccatccgcgccgccgcgcaagccatcagcaattaccgcctggtgggcagcaccctttacgtgaccctggaaccgtgcagcatgtgcgcgggcctgatcgttcattcacgggttgcccgtgtggtgtatggcgcgctggagcccaaggcggggatcgtgcaaagccaggggcagttttttacccagggctttctgaatcatcgagtgttgtttgaaggcggggtgctggctgaggagtgcgggacggtcttgagcgagttcttcaaggcccgaagagccaagcccgctctctaaacgacactggagatccaaatgtgggaggggcttgcccccgatagccgtgtgtcagtaagcatatttatgactgatacaccgccatcgggggcaagccccctcccacatttctgatctccattcattcaaggagaccggaagttatttcctggcgacgatcaccgcccgcatcggcgccggcagtccttcgatagtcttgctgtggtcctcggggtcgaggaagtcactcagcgactggtacttcatccactccgtcccacgctgttcctcgacggtggtcacgctcacatccacgcagcgcacatcactaaagcctgcacggcgtagccatagcatcagcgccggcactgagggcaggaaccacacgttacgcatctgcgcgtagcgatcttccggcactagcacttgttgctgatcgccttcgaccaccaaggtttccaacaccagttcgccacccttgaccagggtgtctttcaacgccagcaaatgctcgatcggcgaacggcggtggtagaacacgcccatggaaaacaccgtgtcgaagccttccagattcgctggcaggtcttcgaacgggaacggcaggtgccaggcccttggctcggacaggtagcgctgcacagcctggaactggcagaaaaacagccaattcgggtccacgccgatcacgctgtcagcgccggcgccgagcatgcgccacatgtagtagccgttgccgcagccgacatcaagaatgcgcttgcccttcaggttcaggtgcggcgcaacccgcgaccatttccagtccgagcgccactcggtgtccacatgcacgccgaacaggttgaacggccctttgcgccacgggctcaggcccatcaacgcagtgtgcatctgcgcgcgggtgtcatcgtcgcagtcggtgtcgagtgtcaggccgttgagcaaatccacgtcgctgggctggatcttgggcagcgcatccagcgcactctgccaacgcgcaaggtcgccatgacccttttccatcttgctgtcgagttgcgcttgcaggccctgggcccacacggccaggggagtgccgaccaggtggcgggcgaggggggacagatcaatcatggcaaggcaatcaacgaggcaaagttaagacactggaaccacggcacgactttagagaacccggccgccagcaggcgttcgcggtgttcttcgaggctgtcgggcttcatgacgttttcgatggcgctgcgcttctgggcgatttccagttcgctgtagccgttggcgcgtttgaacgcgatgtgcaggtcggtgagcagcgcgtgttcttcggcattgttgaagcgcaatttctccgacaggatcaacgcaccgcccggcaacagcgattggcggatgcgcgagagcaacgccaggcgctcatcgggggcaatgaattgcagggtgaaattcagcgccaccaccgaggccggggcaaattgcagtgcgaggatatcgccctcgatcacctcgaccggcagcaactcctggaacatcgagtcctggccgttgaggtattcacggcagcgctcgaccatcgccgtcgagttatccaccgcgatcacccggcaaccgtcagtgcgcacatggcgacgcagggcctgggtgaccgcgccgagggacgagcccaggtcatagagcacgctattgggttgggcaaattgcgccgcgagtacgccgaggttctcgacgatggtcgggtaacccggcaccgagcgcttgatcatgtccgggaacacccgcaccacgtcttcgttgaaggcgaagtccggcacctggggcaggggctgggcgaataggcgatcgggttctttgctcacggttgttccggcgacgattggggaaaggccggcattttagccaacttggccctcggatgcgcgggttgtctgatggaaagccgaggcggtgatgccccattgtcccagccagtaagtgacgatcagcaaatacggcgccgcctcgaacgccaccacaaaccgattgatcccgatcagcgtgtcggaaaacacaaacgacgccgcgcccgccgccgccagcagtgccgagcgttgcggcacttcactgcccaagcgtgccagtgcacgccagagcatggcgctgatcaccagcgcatacaccaccaccggaatcagcaggtcgcccaggccgtgggaaatcaggatgctcagcaggatcgcgcccacgcccaacgccagtagcagcggcagccatgcaagacgacggcagtcgctgaaataggccttgaggtacgccaggtgcgcaaacaggaacgcacccaggccaaagataaacaggtcgccgggccacgccagcaacacgtcgcccaccagggagaaaatcagccccaggctgatccagcgtcgatagtcggtgggcggagcatcatgcagccagcccagcagcgccagcaccggcagcggcttgaccagcaggcacagcaaggtggcatgggtgctcaggccgtagatgaaagtgcccgcgcccatcaacgcaagaatcagccaaggcatatcagttcaccgtaatggcgcagtcaaaggtttcgacgggctcggcttccggctcccagggttgctgggaggtcaggcgcaaacggccctggccggcggcgaacgcctggaagcgccaggtcgattgcccgccgccgccgatcacgccggattctgtgctgctgtagacctcagggctcaacgcacgcagtacgccgccagcggaatcctggatggcccagcggtaaccggtggtggggttgctcggcagggtgagggtcaggttttgtccgcttttaagctggagcgggcaggcgctctggttgtccacgctgatgttttgcttcggtgcgctggcacacgcggccagcagggcaaggctcaaggggagaagcaggcgggcagcggtcatgggggctccgttcattcacgacgaagggcgagcataaccgaagatgagacaaggtgtgacaacaggggattttgtgatgaatgttctggccccatcgcgggcaagccccctcccacattttgatttgtgaacacattcaaatgtgggagtgggcttgcccgcgatggcgtcataccaggcgctagatagctgtcagaagagcaccttcgccacatccgcaaagcgcttggcaaagtgcaccgtcatgccttccttgaggtactccggcaactcttcaaaactgccacggttcggctccggcaagatcagctcatggatcttctggcgccgggccgcgatcaccttctcacgcaccccgccaatcggcagcacatgcccggtcaacgtcagttcgccggtcatggccacgccttttttcggcggctggttacgcgccagcgacaacaacgcactggccatggtcaccccggcgctcgggccgtctttgggcgtggcgccttccggcacatgcaagtgcacgaaggcttcatcgaagaatttcggatcgccgccaaacgatttcaggttcgaactgatgtagctgtaggcgatttcggcggattccttcatcacttcacccaattgcccggtgagcttgaagccgcggttgagcgtatggatgcgcgtggcctcgatcggcaaggttgcgccgcccatgctggtccaggccaggccggtgatcacgccggtgccggacagcacttgctcattgcggaacaccggcatgcccagggagctttccaggtccttgttgccgatcttgatcaccgagtccggctcatccagcagcttgaccaccgccttgcgcaccagtttgcccagttgtttctccaactggcgcaccccggcttcgcgagcataaccgtcgatgagtgcgcgcagggcgccgtcgctgatggtcaggctggttttcgccacaccggctttttccagctgcttgggccacaggtgacgcttggcgatggcgactttttcttcggtgatatagcccgacaggcgaattacttccatgcggtccagcaacgggccggggatggaatccagggtgttggcggtgcacacgaacagcactttggacaggtccaggcgcaggtccaggtagtggtcaaggaattcgacgttctgctccgggtcgagggtttccagcagcgccgaggctgggtcgccctggaagctctggcccatcttgtcgatctcgtcgagcatgatcaccgggttcatcacctccacgtccttgagcgcctgcaccagcttgccgggcagcgcgccgatgtaggtacggcgatggcccttgatctcggcctcgtcgcgcatgccgccgacgctgaagcggtagaacggccggcccagggactcggcgatggatttgcccacactggtcttgcccacgcccggcgggccgaccagcagcacgatggagccggcgacctcgcctttataggcgcccaccgcaaggaattcgaggatgcgactcttgatgtcatccaggcccgcgtggtgtttatccaataccttgcgtgcgtgtttcaggtcgagtttgtcctcgccgtacacgccccacggcaccgaggtggcccagtccaggtagttgcgcgttaccgcgtattccggcgaaccggtctcgaggatcgacagcttgttcagctcttcatcaatgcgttttttcgcctgggccggcagcaccttgccttccaggcgttgctcgaactgttcgacgtccgcgctgcggtcgtccttggtcaggcccagctcctgctggatgaccttgagctgttccttgaggaagaactcacgctggtgctcgccgatcttgcggttcacctcggcggagagttctttttgcaggcgggcgacttcgacttccttgcgcagcatcggcagcactttttccatgcgcttgagcatgggcacgcagtccagcacttcctgcaactcgttaccggtggccgaggtcagcgcggcggcgaagtcggtaagcggcgacgggtcgttggggctgaagcggttgaggtagttcttcagctcttcgctgtacagcgggttgagcggcagcaattccttgatcgcattgattagcgccattccgtaggccttgacctcgtcggtcggctcgctgggctggtgcggatattcgacttccaccaggtagggtgggcggtgatgcttgagccaggtcttgatgcgcacgcgggtcaggccctgggcgacgaattgcagcttgccgttctcgcggctggcgtggtgcaccttcaccagggtgccgtacaacggcaggctggaggtgtcgaagtggcgcgggtcttccggcggcgtgtccatgaagaacagggccagggagtggtgatcggacttgcttaccagctccagggtttcggcccatggttcttcattgacgattaccggcagcacttgcgccgggaagaacggtcgattgtggatcgggatgatgtagaccttgtccggcaggttttgcccaggcagggccaggccggtattggacgaggcggattcagcgttttcggggtcggcgtagtcgttgaggtcgtaatcagggaaatcttgctggtcgctcatggggcacctgcataaggaagtatggtgcttagatggggcggggcagtggtggtttcaatggcggggtggagttagcaacaaattgcatgaattcagctgatcttgtgcagataactcggcaacggctgctccggtaacaccgacagcaccttcaaccgctgcaacatacgttgcctggcccgctgcaaatgctcgcgcaggttcagcgccgccgcatcaaacgcaccatgcagcagcagctccaatatcaaccgatgttcggccagcatggctggatccgcgccgatccccagcaagcggtagaaaatccggctgatgatcattgggctctgaccttggcggatcaacgccgcgatcttgcggttctgcaggccggccaggcagcgttggtgcaagtcttcctcgatctgttcgatggcctccagactgcagtgggggctgtcctgagcggcctgcacgcgctgcaacatggcttcgagcaactcgcggtcgaggtggggcgcgctctggcgcagcgcttcaggttccaggcaggcgcgcagctcgtagtcttcggtgacttcccgtgctgtcaaaggccccgccagccattgcgagtagggctccttttccaccaggccacggtcgcgcaggcgcatcagcgcttcgcgcaccactgcgcggctgacaccgtagtggtcggcggcggcttgctcgtcgaggcggtaatggccgaaggcgatgcaggtggacagcgccgtgccgatctcttcgacgatgcgttcgcccaacggccgcgtatccaccagttcatcctcaccgttgagccccaggtgtgcatggctcaggggcaggcgcagcggttccatggccaggccttcggggttgatcaggtaaccccggccgttgaagcgacagatcaggccttcttcatgcaacaggtccagggccttgcgcaccggcacgcgactggtgccgaacaattcggccagcggtgcttccagcaagaccaggccgtggcgcgcagtgccgttgacgatcgcgtcacgcatcaccttgtgaatcatcgcgtaacgggaggccgaggcggacactgctttcattgcattctctgggctgaagagtctggggccgaggattctctcataagtcgtgcctgtcactctgcgccacgtcggtggcacttttttggggccttgaaagtgaggatgttacttttctgcaccaaaatgtacttattaataaaagatacattatttcattgaaggcgctcctccgtgtccttgcaagatttttcctgccatctaaaagcatctatcccgctgctctgggcaaatatccctcaccgcgcacaaacgtcacgatacagactggcacggaacctgcctttgtaaaatgtacattttattaatatgtacgttttatgaggatcaagtcgatgtcagacgccacttccatggccgaggatttcgccagcggtcgcagcgacccggtgcaagtcctcgaacaggcacttgataaggccagccaaaccccggccgtgttcatcagcctgaccgccgagcgtgctcgccgtgaagccgaagcctcggctgcccgttggcgcgccggccagccattgagtgggttcgatggggtgccgctggcctggaaggacctgttcgatgtggccggcagcatcaccaccgcaggcgctgcctatcgccgcaacgcgcctgccgcgttgcttgatgcgcctacggtcggcctgttgtgccgcgccggcatggtcagtatcggcaagaccaacctgagcgaactggcttattccggcttgggcctgaacccgcatttcggcacgccgcataatccccatggcggcgaccaaccgcgcattcctggcggctcgtcgtccggctcggcggtggcggtggcggccgggatcgtgcccatcgccatgggcactgacaccgccggttccatccgcatcccgtcagcgttcaatggcctggtgggctaccgcagcagcagccgacgctacagtcgcgacggggtgttcccgctggctcacagcctcgacagcctcggcccgctgacccgcagcgtgcgcgatgcgctggccatcgacgacctgctgcatggccgtacccagacccacactgcccgcagcctcaagggccagcgctttgtgctggcgcaacaggacgctgaacccgccgtgcgcaacaatctgctgcgcgcagtggagcaactcaaggcccggggcgcacttgttgaagagcgtgaatgcgcgacgttccaggccaccctggacctgatcaagcaccacggctggctcggttccttcgaagcctttgccctgcatgaagcgctgctcgacagccccgacgccgagcaactcgaccctcgcgtacgtcgccgcctcgaagccgcgcgcgcactgcccgccagtcagcttatccacctgaccgacgtacgccgccgcctgcaacagcaactgatcgacgacctcgacggtgcactcctgatcaccccgaccgtcgcccatgtcgcacccgccctggcagcgctggaggccgacgacgacctgtttgtcaaaaccaatctcgccaccctgcgcctgaccatgcccggcagcttgctcgacatgcccggcgtgaccctgcccagcggccgcgatgcccagggcctgcccaccgggctgctgctcagcgccccgaccggagaagacgcgcgcctgctgcgcgcggcgttgtccgtcgaaaccgtacttaacgtttaaggagacacaccatggctaaagacatcctctgtgcatttggcgtcgacgttgacgccgtcgccggctggctcggttcatacggcggcgaagactcgccggacgatatctcccgcggcctgttcgccggtgaagtcggcgcgccgcgcctgctgaaattgttcgagcgctatggcctgcgtaccacctggttcattcccggccactcgatggaaactttccccgagcagatgaaggccgtggccgacgccggtcacgaaatcggggtgcacggctacagccacgaaaaccccatcgcgatgacggccgagcaggaagaaatcgtcctggataaatccatcgaactgatcacccaggtcaccggcaagcgccccaccggctatgtcgcgccgtggtgggaattcagcaaggtcaccaacgaactgctgctgaaaaaaggcatcaagtacgaccacagcctgatgcacaacgacttccacccctactacgtgcgcaagggtgacagctggaccaagatcgactacagccagcaccccgacacctggatgaaacccctggtgcgcggcgaagaaaccgacctggtggagatcccggccaactggtacctcgacgacctgccgccgatgatgttcatcaagaaagcccccaacagccacggcttcgtcaacccgcgccaccttgaagaaatgtggcgtgaccagttcgactgggtctaccgcgaacacgaacacgcggtgttcaccatgaccattcaccccgatgtctccggccgcccgcaagtgctgctgatgctggaacgcctgattgaacacatccaaagccatgccggtgtgcgcttcgtcaccttcgacgaaatcgccgacgacttcatccgccgccaaccgcgtacctgaacctttgcaaccacccctgaggcgcgacccatgtccatctacaacaagcttgacctgactggctggaaaccccggcaactgacgtcccaggaagtgcgcttcgccacctggatcgcgtttttcgcctgggtgtttgcggtgtatgacttcatcctgttcggcaccttgctgccggagattggccggcactttggctggggtgaagtggagcaagcggaaatcgcgacctgggtcgcggtgggcacggcggtggtggcgtttgccattggcccggtggtcgacaagttgggccgacgcaaaggcattatcttcaccgtggccggctccgcgctgtgttcggcgctgactgcgattggcggcgcgtggggcaagtcgccgctgattctgattcgttcgttgggcggcctgggctatgccgaggagaccgtcaacgccacctacctgagcgagctgtacggcgcctcggaagacccgcgcctgaccaaacgccgtggctttatctacagcctggtgcaaggcggctggccggtcggtgcgttgatcgcggccgggttgaccgcgctgttgttgccgatcatcggctggcagggctgctttatcttcgcggcgatcccggccatcgtcatcgcgatcatggcgcgcaagctcaaggagagcccgcagttccagatccaccagcgcatcagcgagctgcgtaaaagcggtgcggtgaaagaagcgcagaacgtcgccgtgacctacggcgtggactacgacgaacacagcaaggccggcctcaaggccgccttccgtggcccggcgcgccgcgccacgttggtgatcggtgccgcgctgttgctcaactgggcagcgatccaggtgttcagcgtgctgggcacttcggtgatcgtcagcgtgcaccacatctcgttcgagaactcgctgatcatcctcgtgctgtcgaacctggtgggctactgcggttacctcagccacggctggatgggcgacaagatcggccgccgcaacgtgatcggcctgggctggatgctcggcggcctggcgttcgccgggatgctgtttggcccgagcaatatgccgatggtggtcgggctgtacagcctgggcctgtttttcctgatcgggccttactcggcggcgctgttctttatcagcgagagtttccccaccagcatccgtgcgaccggtggcgcgatcatccacgccatggggccgatcggcgctgtagtcgcaggctttggcgcgacccaagtgttgtccgccggcagcgactggcagaccgccgcgctgtggttcggcgcgctgccgtgcttcctgtccggcgccttgatgtttgccgcacgccatgtgcgtccggaaaccgttcagtaaggagtgatcgatgagccgtaaagttgccttgattaccggtgccgccagcggcatcggccaagccctcgcggtggcctatgcccgcgtgggtgtggcggtggttggcgggtattactcggccgatccccatgacccgcaggccaccgtcggcctggtggaagaagccagcggcgaatgcctgatgctgccgttggacgtgggcaataccgcctcggtggacgccctggccgaacaggcggtggcgcatttcggccggctggactacgccgtggccaacgccggcctgctgcgccgcgcaccgttgctggagatgaccgacgcgttgtgggacgagatgctcaatgtcgacctcacgggggtgatgcgcaccttccgtgcggccacccggcatatgaccgaaggcggcgcgctagtagcgatttcgtcgattgccggtggcgtgtatggctggcaggaacacagccattacgcggcggccaaggctggtgtgccggggttgtgccggtcgctggcggtggagttggcggcccgggggattcgttgcaatgcggtgattccggggctgatcgagacgccgcagtcgctggacgcgaaaaattcgctggggccgcaaggcttggcgaaagcggcgcgggcgatcccgctggggcgggtagggcgggcggatgaagtggcgtcgctggtgcagtttttgaccagtgaggcgtcgagttatctgaccgggcaaagcatcgtcatcgacggtggtttaaccgtgcgctggcctgactgatgtacccgatccaaatgtgggagggggcttgcccccgatgacagtttgtcagccagcttatctgtagctgactctctgcaatcgggggcaagccccctcccacattggaactgtgttttctgtaggagatgtgtgtatgcctcaacttcttaaccgtcgcgccgtgatcaccggcgccggcagcggtatcggtgcggccatcgcccgtgcctacgccgctgaaggcgcacgcctggtgctggctgaccgcaatgcggccagcctcgccgaaaccgcgatcacctgccgcaacctcggcgccgaggtgttcgaatgcctggccgacgtgggcactgtcgaaggtgcccaggccagtgtcgaccgctgcgtcgaacactttggcggcatcgacatcctggtcaacaacgccggcatgctcacccaggcccgttgtgtggacctgacccttgaaatgtggaacgacatgctgcgcatcgacctcaccagcgtgttcgtcgccagccagcgcgcgttgccgcacatgctcgcgcagcgctgggggcggatcatcaatgtggcttcgcaactgggcatcaagggtggcgccgagttgacccattacgcagcggccaaggcgggggtgatcggttttaccaaatccctggcgctggaagtggccaaggacaatgtgctggtcaacgccatcgcccccggcccgatcgagacgcccctggtcggcggcatcagcgaggactggaagcgtgccaaggccaaggagctgcccctgggccgcttcggcctggcggatgaagtggcaccggtcgcagtgctgctggccagcgagccgggcggcaacctgttcgtcggccagaccctgggcccgaactccggcgatgtcatgccatgagtgaggtgtagccatgtgcggactctgcgggctgctcggcgaagacctgcactggagcgatcccctgggtgacgaactgccccggcgccgcgaacgcctgcgccggattgcggcgatcaaccaggtgctggcggtgttccggctcaaggtcgaggacttccagggcgcgtcctatctgctgttgggcgctaccgggaaacaggaactggccagcggcctggatcaactctggctagccgccgagaccatgctcggcagccctttggacccgctcgacccacgcttgctcgatcatttggaggcctgcgtatgagcatcgccctcaacgtcatcactggttttcttggcagcggcaagaccaccttgctcaagcgcctgctgcaaggcgaaagcctgggcgacaccgcgctgctgatcaacgagttcggtgacgtcggcatcgaccacctgctggtggaggaggtggcgccggacaccgtgctgctgcccagcggctgtgtgtgctgctcgatccgtggcgagttgaaagacgcgttgctcggtctgttgcaacgccgtgagcgcggtgaaatcccggcgttcaagcgggtgatcctggagaccaccggcctggccgacccggcgccgatactcgcgaccttgaacaacgatgtgcaactgcgcgggcgtttccatatcggcctggtgatcaccctggtcgacgccagccacgcgcccctgcaagaacgcctgcacccggaatggctggcgcaggtggcggcggcggatcgcctgttgttgagcaagaccgatctggccggtgactgcactgtgttgcgcaaccacttgcaggcactcaatgccggcacgccgatcttcaatacccaggacattcacagcggcgaccagttgctgctcggcgaaggtttgcgcagcgccgaacctgctgttgaagtcagccgttggcagttgcatcgcaccaccaccgccacccacggcgccgcacaagtgtgcagcctgacctttgaccagccgctggactgggtgggtttcggagtgtggttgtcgatgctgttaagatgccacggcgaacgaatcctccgggtcaaagggctgctcaacgtgaacgccagtaacgctcccatcgtcatccatggcgtgcagcattgcctgcacgcgccggtgcatttgccggcgtggccaggcaccgaccgccaatcgcgcctggtgtttattttgcgtggcctcgaccctgcgctgctgcggcgctccttcgacgtgttctcgcggcggttcgccgcatgatcacactgcgcgtcctcggcacctccgttaccctgctcgaatgcctgcgcgtacgcgccgaacaggagttgggcattcgcctggtgtaccaggtgcacgacgtcgaacaggcccagcgtatcgcggtgatgcagcccgacagctacgacctgtacgaccagtggttccacaacgtcgactttgtgtggccggcccaggcgatccaacccatcgatacgcggcgcatcgccttgtggcatgagatcaacgacctgcccaagcgcgggcgcctgtcggccgacgaccgcctgggcagtggcagcgtgcccagtgagcggctgttcgtgcagcacgacggcagcctcggcagcacagtcaccgagcgcatcagcatgctgccactgacccacaacgccgacagtttcgcctaccgccccgagcgcttgcctgagggcttctgccacggcaacgagagctggggttggctgctggacccggcttggcgtgcgcgcaccgcgctgcaaagcgacgccgccatcggcgccctggacgccgcactggcggtacagggcgcggggctggccagcttcagggacatcggcaatatgagcatcgaggagatcgacgtgctcgcggacatcctcgtgcgcaaacagaaagaagggcacttcgcggcgttctggtccgatgatgaagaggctgcgcagttgatgctcagcccgagtatcgatatccagagcctgtggtcgccgaccttgatgcgcctgcatcgcgcgggggttaagtaccgcctggcggtgccgcgcgaaggttatcgcgcgtggtttggtgggttgtcgttgtcgcggcatgccaagggggcggtgctggacgcggcgtatgcgtatttgaactggtggttgtccggctggcctggggcggtgatggcgcggcaggggtactacatcggtaacccggcgcgcagtcgtgatcatttgagcagtgcggagtgggattactggtatgcggggctgccggcgcgggaggagttgctgggcagtgatgggttgccgctgatcgatgtgggggaagtgcgggatggggggtcttatgagcagcgcatggggcatattgcggtgtggaactcggtgatggatgagcataattatctggtgcggcggtggggggattttatgcgggctcggggggggtgattggttgattgagtacatatccgttatttaggtaacggccacctatggttccgctcttacagcgggtcactttttgaagagcgctgtacggaccggacacatggttgacgggtgtacggggacatggtggacacttttcggcggataaacttcgccgggaaatcatcatgccttgggacacgagagataccatgagcctgaaagaaga

SEQ ID NO: 67 - DNA, 78670 bp, Pseudomonas nodulensis; identical to SEQ ID NO: 24

SEQ ID NO: 68 - DNA, 166589 bp, Pseudomonas nodulensis
  misc_feature (88472)..(88523): n is a, c, g, or t
  misc_feature (141121)..(141121): n is a, c, g, or t
cgactctcatcgtggcgctggggcaagccccaaacagacgccggatagatttaagcaagccaaccacaccacccgttaatcagtattgcaaaaatgggggtgaccatagatttttatgcgcgggattccacttcagtcgttgaagtcttcccagccgcccatctgcttccagcggttgacgatgccgcagaacagctcagccgtcttctccgtgtcgtaacgggccgagtgagcctcacgaccgtcaaagtcgataccggccgcctgacaggctttcgccaacacagtctggccatacgccagcccggcgagggttgcggtgtcaaagctggagaacgggtgaaacgggttgcgcttcatgtccaaccgcgccacggcggcattcaggaagcccaggtcaaagctgctgttgtggccgaccaggatcgcgcgtttgcagccattggccttcaatgccttgcgcacgccacggaagatatcggtcagtgccgcttcttcacttactgccatacgcaatgggtgatcgagcttgatcccggtgaactccaaggcagccgcttcgatattggcgccttcgaacggctcgacgcggaagaagtgggtgtgttccgggaacacaaaaccctgttcgtccatgccgatagtcgtcgcggcgatttccagcagcgcatcggtggcgcagttgaaaccaccggtttctacgtcgatgacaaccggcagatagccgcggaaccgctcggccatcggatgacgggatccgccaccgctgtgctcgtgttcgtcatcgtaatggtcttcactcacttgctttcctccagcaggcgccagcgcagtgtttcaccggcgcgcagcgggatgacagtcagctcgccaaacggcaggcttgcaggggcggtccagtcttcacgaaccagggtaatgcgatcggtattcgcgggcaggccgtagaaacgcgggccattgaggctggcgaacccttcgagcttgtccagggcgttgcgctgttcgaacgcttcagcgtacagctcgatggcggcataggcggtgtagcagccggcacaaccgcacgcggcttctttggcgtgctgggcgtgaggcgcggagtcggtgccgaggaaaaacttcggattgccgctggtcgccgcatccagcaaggctacctggtgggtgttgcgcttgaggatcggcaagcaatagaagtgcggccgaatcccgcccaccagcatgtggttgcggttgtacagcaggtgatgcgcggtgatggtcgcagcaacgttggccgaggcttcggtgacgaactgcacggcatcggcagtggtgatgtgctcgaacacgaccttgagggtcgggaacagctccaccacgcgacgcatgtgttcgtcgatgaagatcttctcgcgatcgaacacgtccacatcgccacgagtgacttcaccgtggatcagcagcggcatgccgacgtcggccatggcttcgatggccggcaggatcttatcgatactggtcacgccggaatcggagttggtggtggcgccggccgggtacagtttggcggcgtgcacaaacccactggccttggcctcgcgaatttcttcgggctgggtgcggtcggtaaggtacagcaccatcagcggttcgaaccggctgccggccggccgtgcagcgaggatacgctggcggtaggcatcggcttgctcggcgttacgcaccggaggaaccaggttaggcatgatgatggcgcggccaaaggtacgcgctacatcggccacggtgtggggtaacgcagcaccatcgcgaagatgaatatgccagtcgtcgggacgcagcagggtcaggcggtcggacattggggattccaggcgggtcaatctggggggaatgctaccggaaaagactctatcaggcactcgctatcaagttttgcaggatgcaaccgatagccttttgtatgccttatcgatgtatgacgctttgaagtgttgtagaaaccagtggagcctcccgtgcgccagcattacctagccctgctcagtgtgttcgccagcctgcccgcgatggccctcacgttccagacacgtctggagaacattgagtggaaggtagagggcgaccagttcgagtgccgtctgacccagccgatcacagacttcggttcgggtgagttcgtgcgccgggcgggtgagcaggcaatatttcgtctgaaagcctataacggttcgctgggcacaggctcggccaccttgttggctgccgccgccccttggcagccaggccgaggcgatatcaacctcggcgccgtgcgtgccggtagtggcgatgtgttgttcaatagctcgcaggcccaggccggtcgcctgttcaccggactgctggaagggcgcagcccgacggtccgccactacggccgtgaaggcggctactccgaaatccgcttgttgccggtgaaattcaataaggcttataacgactaccagctgtgcaccgccaagctgttgccgatgaattacgatcaggtcaaacagaccgaagtcggattccctggtggcggtatcgagttggacgcagccgccaagaagaaactcgacgtgattcttgcattcatgaaagccgacccgacggtcaaccatatcgagttgaatggccattcggacaacagcggcaaccgcctgaccaatcgcgacgtctctcgccgccgcggcttggcggtgatggactacttcaaggccaacggtatccaggaatcgcagatcaccctgcgcttccatggcgaaagctacccccttgcgcccaacaccaatgcggccaaccgggcacgcaatcgtcgtgtgaatatccagcttgaacgcgtggcagcccccgagaagccggcgccccaagccactggcgcaagcaaccctgcacacacgtcctaaggtgcgaccatcggtcgcccgttcgacataatctgtcgctttatcttcatttgctgtcgcgcccctgtaaattcacggttttggtcggtagaatcgacgcctttccgtacaaccccgtggagtgatggcatggccgacgtaaacaaggtcgttctcgcgtattccggcggcctggacacttcggtgatcctcaagtggctgcaggatacttataactgtgaagtggtgaccttcaccgctgacctgggtcagggcgaagaggtcgaacctgcacgtgccaaggcgcaagccatgggcgtgaaagagatctacattgacgacctgcgcgaagagttcgtccgcgatttcgtcttcccgatgtttcgcgccaacaccgtctatgaaggcgagtacctgctgggtacctccatcgcacgtccgctgatcgccaagcgcctgatcgaaatcgccaacgaaaccggcgccgacgccatttcccatggtgctaccggcaagggcaacgaccaggtgcgattcgaactgggtgcctatgcactcaagccaggcgtgaaagtgattgccccttggcgtgaatgggacctgctgtcccgtgaaaagctgatggattacgctgaaaagcacgcaatcccgatcgagcgtcacggcaagaagaagtccccgtactcgatggatgccaacctgctgcacatctcctatgaaggcggcgtgctggaagacacctggaccgagcacgaagaagatatgtggaaatggaccgtctccccggagaacgctccagacaagccgcaatacttggaactgacctaccgcaacggcgacattgtcgcgctggacggcgtcgaaatgaccccggccactgtgctggcaaccttgaaccgtatcggtggcgaacacggtatcggccgtctcgacatcgtcgagaaccgctacgtgggcatgaagtcccgtggttgctacgaaacccctggcggcaccatcatgctgcgcgcccaccgggccatcgagtccatcaccctggaccgcgaagtggctcacctcaaagacgagttgatgcccaagtacgccagcctgatctacaccggctactggtggagccctgagcgtctgatgctgcaacagatgatcgatgcttcccaggtacacgtgaacggcgttgtgcgcctgaagctgtacaagggcaacgtgatcgttactggtcgcaagtccgatgagtcgctgtttgacgccaacattgctaccttcgaagaagatggcggcgcctacaaccaggcggacgcagcaggctttatcaagttgaacgcactgcgcatgcgcattgcggccaacaaaggtcgctcgttgttctaagtctcagccggttttaagaatggccccttattcaggggccattttttttgcctatggattttgtgtggagatgcaatgtttataaaaggttaaacatttgttgatgtttttcagtagacgcattttcaaatgcgccttcgatggtgctgttgttgaaagtttgtagggcgaatgatttttttacacctgcttaggaactggtcttacagaagattcactcatgaaagtgaggtgggcgtataaaacacggaacactctgtaggaattaaggatgtaagagaatatgttaaatggaactaaaacagtcggacacttcttgcccggattcctgcgcgtaggacagaggcaaggggcatttcctgagagttgtgtgcggcacgtttacccaacccctgatactccatggatatttcactcaaaatatgtaagtccccggaaaggtctgaaaggatctataaaactggatacatctgagttggcgtttttttgtagggcaattcctttatcgctgtggggtgggtctctgcttgctgttgctcgggggggaacgctatgccaaccaggaaacgactaggctattgtgcttgctctaaataattcgaacagcgaaattggactttctcatgaataaagtgctgatcgtggatgatcatcccgtcattcgtcttgctgtgcgtatgctaatggagcgtcatggttatgaggtcgttgccgagaccgataacggtgtcgatgcattgcaacttgcacgggagcatatgccggacattgtcatactggatattgggattcccaaacttgacggcctggaagttatttgccggctgtcttctaccaagcaatccgtgcccttcaaggtgctggtgctgacgtcccaggcccctggccatttttccatgcgttgcatgcaagcgggggctgccggctacgtgtgcaagcaacaggacctgaccgagttgctgagtgcgatcaaggcggtgctgtcgggctacagctacttccccaaccaggcgctcaactcggtacgctccaccatgggcaatgccagcgaggccgatatggtcgagcgtctgtcgggtcgggaaatgatggtattgcagcagttggcccggggccggaccaacaaggagattgccgacggtatgttcctcagcaacaagaccgtcagcacctacaagacacgtttgctgctcaagctcaacgcccgctcccttgtggacctgatcgaactggcccagcgtaacggcttggtatagaggagggcaccgcagcgcgcattatctgggtaaccggcagaaaaaagcctccgtaagggaggcttccggccgtcgatcgttcgatcacagatcgaagtcgtaatcggccagctgtttttgcaagcgtcgttcttccagaagattgtcgatggtgcggcgtttgctcaaattggtcttggctacctcaacgacgggtgcctctgccacatcatcatccgattcaacgaggtcgtcttccacttccagttgttctttgccagtgctcataaggttcactccgggctaagactgccgttggcgctccttataacgataatccatgatcgggtaaaaaagattttttcaatcgcctgatcaagaaaaccaatgatccctcaatcgtcggatgtcttgtccttgtattcgcacaggtcttcgatacgacagctgccgcagcgcggcctgcgggcctggcaaacgtagcgcccatgaaggatcagccagtggtgagaatccagcagatagggcttgggtacaaacttcatcaactgcttttcgacctcaactacgttctttccacgggcaatgccggttctgttgctgacccggaagatatgggtgtccaccgccatcgtcagttgccggaacgcggtgttgagcaccacattggcagttttacgacccacccctggcagggcttccaaggcttcacgggtttgtggcacttcactaccatgcagttccaccagcaggcggcaggtctcgataacgtttttggctttgctgttatagaggccgatggtcttgatgtactcagacagtccttccacacccagggcatagatcgcctctggtgtgttcgccacgggatacagcttggccgtggccttattgacgccgacgtcggtggattgggccgacaggatcaccgcaatcagcaactcgaacggcgaggtgtaggccagttcggtcttgggttccggattgtcttcgtgaagcctgcgaaatatttccaggcgttttgcggcgttcatcgggtagcgggttccttgcagacggtcagcgggattgtatcaacacacaccgcaggtttgcgggtcaggtgttgctgagggcatccatatggcgctgcgcatcgtccagcttcagttgcgcctcggccagttgctgcggttcgacgttcaggtcctgggctttcttcagttccgctcgacgcatcgccagctggattttggcccgtttcagatcagcagtgttgctgaatgacgtcgctgctttcggtacgatccccacctccaaggcagccagcgcttgttccgccgcttcgaactgctgttgcaggatgatcaactgcgactgctgttcaaaggtcggtggatgaccaaacgccttcaaggatttgtgcagttgggcgcggctcatcgcgacagcgattttggcttttttggtcgccgcatcctcggcaacatcggcctgcacctgcaaaaccgacgtggaacgcttggcccgagcctggcgttcggcgagtctatctgcttcttcgcgttgcaggcgtgcattgcgctgctcaaagcgtcgccgcgccctgtcgcgtttcagaccgcgttcatggtgttgacggtcattgatcaccagtccgcccaccatgggcagcacacgggtcgctgggcgcatctcaatgcaatcgacagggcagggcgcaacgcacaggtcgcagccggtgcactcatccatgatgacggtgtgcataagcttggcggcgccgacaattgcgtccactgggcatgcctggatgcacttggtgcagccgatgcactcggcctcgcggatgtaggcaacctgggcgggcgcttccccgcgactggtgtccagatccagcaccggtacctgcagcaacagcgcaaggccggcgatggtttcctctccgccgggcgggcacttgttgatcgcctcgccacgcgcgatacccgcggcgtaaggcttgcaacccgggtgcccgcacttgccgcattgggtctgcggcaggagtgcgtcgatgcgttgaatgaggttcatgctgtgatcatgggcatagcaaaccgggtttaataggaggctggggctctcttgtggtgagcggggcaagcccgctcactacaaggtggcttacttgatacgttgacccggcttggcaccactgtcagggctgagcaggtagatctcttcgccaccagggccggccgccatcaccatgccttcagacacgccgaacttcattttccgaggcttgaggttggcgatcatcatggtcaggcggccatcgagtttggatgggtccgggtaagcgctcttgatcccggagaacacgttgcgttgctcaccgccgaggtccagtgtcaggcgcagcaacttgtcggcaccctccacggcttcggccttgacgatcagcgcgacacgcaggtccaccgcagcaaacgcgtcgaagtcgatttctgcggaaatcggatccttggccagttcgccattaccagccggcgtcgattcgccagtgtcggtctggctggcgaccaggtcttctttcgaagcgtcggtcatggcctggactttcaccgggtcgatacgggtcatcagcggcttgaactcgttcaactgatgattgctgagcaggctggcgtgatcattccaggtcagcggcgccacgttgaggaacgcctcggcgtcggcggccagcagtggcagcacgggtttgaggaagatcaccaactggcggaacaggttgacgcccgttgcgcagatcgcctggacttctgcctgcttgccttcctgtttgttcagcgaccatggtgccttgtcggcgatccaggcgttggcgcggtcggcaaggcccatgatctcgcgcatggcacgggcgaagtcgcgggcttcataggcgtcggcaatgctcggcgcggcggccaggaaggcggcggtcagttccggcgcagcgttctcggctaccagtacgccggcattgcccttgtggataaacccggcgcaacggctggcgatgttgacgactttaccgaccaggtccgagttgaccttctgtacgaagtcttccaggttcaggtccaggtcatcgacgccacggcccagcttggacgcgtagtagtagcgcaggtattccggtgacaggtggtccaggtaggtgcgcgccttgataaaggtgccacgggacttggacattttctggccgttgaccgtcaggtagccgtgcacggcaatgccggttggcttgcggtagcccgaaccttcgagcatcgccggccagaacagggcgtggaagttgacgatgtccttgccgatgaagtggtacagctctgcgctggagtccttgctccagaacgcgtcgaagtccagctccggcgtgcggtcgcagaggttcttgaagctggccatgtaaccgatcggcgcatccagccatacatagaagtatttgcccggctcgcccgggatctcgaagccgaagtacggcgcatcgcgggagatgtcccattgctgcaggccgctgtcgagccactcggagagtttgttggccacggcatcctgcagggtgccgctgcgggtccaggtttgcagcatctgctggaaatccggaagcttgaagaagaagtgctgggaatccttgagcaccggggtggcgccggagattgccgacttcggatccttcaggtcagtgggtgcataggttgcgccgcacttttcgcagttgtcgccgtactggtcttcggtgccgcatttcgggcaggtgcccttgatgaaacggtcggccaggaacattttcttttccgggtcgaaatactgggtcaccgaacgctggtcgatgtgcccggcttccttgagccgcaggtagatctggctcgacagttcgcggttttcttcggagtgggtcgagtggaaattgtcgaaatccaccaggaactcggcaaagtcggcgctgtgttcagcctgcacattggcgatcagttgttccggggtgatgccttccttttcggcgcgcagcatgatggccgaaccgtgggcgtcgtccgcgcagacataaatgcattggttgccgcgatgcttctggaagcgcacccacatatcggtctggatgtactcaagcatatggccaagatggatggaaccattggcatagggcagggcgctggtgacgaggatcttgcgtggctcggacatggggctcggctacttgatgaaacggaggtcggccactataaagcgccgggaaatatatttcaccccgtgccgctgtttcagaatcttcccatcctgcgaaagcatgccgtaaggccgctggaacggttaggatagccacctgtttcattcagtctttttcgggagtagcccatgagcgccgtcaatcgcgcagcggtggaagccgtgcttcgccagtacaccgacccttatttgaaccaggacccggtcagtgccggctgtgtacgcgccatcgacgtccagggcgaccaggtgtcggtccaattggagctgggttatgcagccggtctgttcaagagcggttgggcacagatgctgcaaatggccattgaaggtctcgacggcgtgcggtcggccaaggtcgacatccgatgcgtgatcgccgcgcacaaggcccaggcacagatccctggcctggccaacgtcaagaacgtagtggctgtggcgtccggcaagggcggcgtgggtaaatccaccacggcggccaacctggccctggccctggctcgcgaaggcgcgcgcgtggggattcttgatgcggatatctatgggccgagccagggcgtgatgttcggcatcgccgaaggcacacggccgaaggtcaaggaccagaagtggttcgtgccgatcgagtccctgggcgtggaagtgatgtccatggccttcctcaccgatgacaacacgcccatggtctggcgcggcccgatggtctcaggcgctttgctgcaactggtcacccagaccgcctggggcgacctggactacctggtgatcgatatgccgccaggcaccggtgacatccagctgaccctggcgcagaaagtcccggtggccggctcggtgattgtcactacgcctcaggacctggccttgctcgacgccaagaaaggtgtggaaatgttccgcaaggtcaacatcccggtgctgggtgtggtggagaacatggcggttcacatctgctccaactgtggccatgccgagcatctgttcggcgaaggcggcggcgagaagctggccactcagtacggcgtggaactgttggcctccttgccgctgtcgatgctcatccgcgagcaggcggatggtggcaagcctaccgttgtggctgaaccggacagccagatcgccatgatctatcaggagctggcgcgtcatgtcggtgcgcggatcgtcctgcaggaagccgccacgcctgccatgccgaccatcaccgtcagcgacgactgaggcgtttgaagggaaaaagcctcgacgttgtcggggctttttcatgcctggaagacggtcaaggtgcgtttgtttcgcaattgcacagctggtcgtgtaagcatttgcttactttttcgtaagtgtttggggttttttccttccatggacgtccgttttcttcgagagttttttctaaccaattgaaatttaacaattaattattccgtgttcagggcgattgcatgtcagttcatgggttggatcccgttgaacttcctttggaactctttaagatcagccctgtgtccacggattggcacagccttcaaggaacgatggttgaaggaacgtcgcaggatgcgattcatcaggatgatgaaaaggaatacagggactagggaaaaaatgtgggcgggtcataccgccccttttttttgcctgcaggaaagtgaaaccggtcgtccagaaacgcaaaaaggcccgcaaggggccttttggaggggggcgacgctatcagcgttcgaggtctgcaatcttaccttttttgccatcccactccgctgcgtccggcatcgggtctttgcgttcagtgatgtttggccagatttccgccagctcgacgttcaactgaatgaattcctgcatctccgccgggacttcatcctcggagaaaatagcgacggccgggcattcaggttcacacagggcgcaatcgatgcactcatccgggtggataaccaggaagttcgggccttcgtagaagcagtccaccggacacacttcgacgcagtcggtgtacttgcacttgatgcagttgtcggtaacgacgaaggtcatttctaatattctcctcaggcggcggcagcgaaaccctttgtggcagggctcgcgaggttcgggagcgatagtctgcaggccaggctaaaagcctccagcatcccaaaccgcgcgagagtctaccagcttgcaagcgtctgcgttatatccgaacttgcagtgcatataacatttcgagcgcttttcgcggcgtcaagccatccaagtcaagcttagccaattcatccagcaccggatggggcaggctggcaaacatgtcgctctggtgcggcgcagccggtttgctggcggctttggctgggctggcgaccaccgtctcatgcggcagggccgtggtttccaggcggcggaggtgctcgcgagcgcgggtgatcacatcgttcggaacccccgccagttgcgccacggccaggccgtagctctggctggcgggccctggcagcacgtggtgcaggaacacgatacgctcgttgtgctcggtggcgttcaggtgcacgttggctaccagcggctcgctttccggcaacaccgtcagctcgaaatagtgcgtggcaaacagcgtgtaggcacgcaggtgcgccaggcgttcggctgccgcccaggccagggacaagccgtcgaaggtgctggtgccgcgacctacttcgtccatcagcaccaggctgcgttcggtggcattgtgcaggatgttggcggtctcgctcatctccaccataaaggtcgagcgcccaccggccaggtcatcgctggagccgatccgggtgaaaatgcggtccaccagggacagttcgcaactggccgccggcacaaagctgccgatatgcgccagcagcacgatcaaagcggtctgccgcatgtaggtggatttaccgcccatgttcggaccggtgatgaccaacatgcgggtatcgtcgtccagcgacaggtcgttggcaacgaacggcgtggtcagcacctgttctacaaccgggtgacgaccttgcacgatgcgcatgcatggctcgctgacaaaacgcgggcagttcaggtcaaggttcagcgcacgttcggccaggttactcagcacatccagttcggccagcgcggcggcagtgtcttgcagcggcgccaattggctgatcaagtcttccagcaagttctcatagagcatcttctctcgagccagggcgcggctcttggccgacagcgccttgtcttcgaattctttgagctccggggtgatgaaccgttcggcacctttgagggtctggcgacgttgatagtcgatcggcgccgattcggcctgcttgctgggcaactcaataaagtagccatgcacacggttgtagccgactttcaggttggccaggccggtgcgggctttttcgcgggcttccaggtcgatcaggaactgcccggcgttttcgctcagggactgcagttcatccagttcgctatcgtaaccggtcttgagtacgccgccgtcacggatgatcgccggcgggttgtcgatgatcgctttttccagcaaggccgccagttccgggtaggtcccggctgtgacggcgagttgttgcaggtgcggcgtatccagctcggtcatcgccacttgcagttgcggcagggcgccaagggcatcgcgcaggcgtgccaggtcgcggggccgtgcgttacgcaggccgatccgcgccaggatacgctcgatatcgccgatttccttcagctgtggctgcagcttttcaaagcgatagccgtccagcaggcaggtaatggaagtctggcgcgcttgcaatactgtcaggtcccgcagcggacggttcaaccagcgggtcagcaggcggctgcccatagccgtctggcaacgatcgaccaccgattgcagggtgttatcgcgaccaccggccaggttggtatccagctccaggttgcgacggctggcgccatcgagcaccacggtatcgtccagacgctcatgacgcaggctgcgcaagtgcggcagggcggtgcgctgggtttccttggcgtagccaagcaggcaaccggcggcgccgatggccagggtcagggtttcgcacccgaagcctttaaggtcctgcaccgagaactgctggcacagacttttcagcgccgaatcacgctcgaaatcccacggcgcacggcgcttggccccacgacgtttttctgccggcagatccttcggccaatcatccgggatcaacagctccaccggattgatgcgctccagctctgccagcaggttctcccagcccttgatctccagcacgctgaagttgccgctggtgatatccagcaccgacaggccaaacagacgctcatcgcccaacaccgcagcaatcaggttatcgcgacgctcatccagcagcgcctcatcactcaccgtccccggcgtaataatacgcaccacctggcgttctaccggccccttgctggttgccgggtcgccgatctgctcacagatcaccaccgactcgcccagcttcaccagcttgacgaggtaaccttccaacgaatggtaaggaatcccacacatcggaatcgactgccccgccgactgcccgcgcgcggtcagggtgatgtccagcagcttggcggccttcttcgcgtcttcgtagaagatctcgtagaagtcgcccatgcggtagaacatcaactgatcagggtgctggttcttgaggcgccagtactgctgcatcattggggtgtgggaggacaggtctgaagtggttttactcattgggtcgtaggcaaattcgttgaaaggagtggggcaaatgtggggcattccgccctgcgattttgcaatgggcgcaaggttaacacgcaaggtcggcgcttcgcaggtcgcaaacggataggtaaaacgcaaaagggggcggcgcatttactcaactgcaaataagcgcgccgcctgtatctgccatgcctttgtattacagcgcccgcacggggatgcagatgtcacagatgaactcaccggtgtcagaatcggttgcggtcgccgcaaaaaacgtctcgaaacatggccggtcatcgcattgcagaccgctggagggcatccattcacgcgtcagccacatccaggcatcggctattttgtctgttttccctttgaagctcgctacggcatagcggccgcccggcagggtctggatatctgcttgggcgctggtcacaaaagaggctggcacttcaacgcaggcgtcatagcggcacttagttggaggcgtgatcgaaggatcgtcataccctatgccgtaacaccgttcaccgccgaggccgttggagtgcatccacggcgccatggtcccgcgccagaagtagccgattgcggggccgtaggggccgatcaggcgttggtaggcaacgcgtaccttgggtaaatcaataatgcgtacgtccatggtgggctctttcactgaaggagaagagaacccagcgtcgtcgaacgtacgctcatgtgcctgatgggcattgccgaagacctgatcgggattgctctcctgcggacccggccgcggcccgatggcagccgcctgcgctgccagccgctgtggtgtgttggcgcgccactcggatggcgtgcagccaaactggagtttgaaggcccgtgcgaatgcttcgcccgaattgaaaccgctggccaatgccgtttcaagcacgctttcatggctgccgcaggacaggcggaacgctgccttctccagtcgccgccgccggacgtagctgcccaaggtctcgcccatccacgccgcgaaaatccgatgaaaatggaagcgcgaaaagttggcgatatcggccaaccgggcaccctccaagggggtgtccaggtgggcatcgatgtagttgagtacgcggttcatacgccgggcgtactcggcgcgggatgcgtgggcgcagattttggtggtcatagtgcgtggtagtatgcacaaaaaatgcaaattagcatttgccaagccaaaaaactcccgtcactatccccgttatgcaaaaacgcaacgtttctatcgtattaagagaactgctggaccgcgaccggatctcccccacggagcttcaccggcgtactggcgtgcctcaatccacactctctcggatcctcagcggcaagatcgttgatccgtcggacaagcacatttcccgtatcgccgagtacttccgcgtcagcaccgattacctgcgcgggcgcgcggccatgggcgctttgcgcgatgacgtgcgtgacccgatgcattcggaactcaaggacataagcctgtgggacgacgacacgcccgttaatgatgacgaggtgtcgatcccttttctgcgcgaggttgaattggctgctggatcaggaagattcgtcatcgaggaaagcgagaaggccagcctgcggttcggcaagcgcagcctgcggcataacggtgtgcagttcgaccaggccaagtgcgtgaccgtgcgcggcaacagcatgttgccggtgctgcgcgacggtgcgacggtcggggtgaacgcgggcaaaagcggcattggcgatatcgtcgatggtgacttgtatgccatcaatcacaacggccaattgcgcgtgaaacagctctatcgcctgccttccgggattcgcctgcgcagtttcaaccgcgacgagcacccggatgaggactatagcttccaggatatccaggatgagcagatcagcatcctgggccatgtgttctggtggggcatgtacgcccgttaaccttcttgcgtaagacaaagcccgccaacgagcgggctttttttcgtctgcagaaaatcgccaaaccctcggcccacgaggctaaaaatgcatgtgtgcatttatgcggtaaaaataaatgcatttatgcattgactgtatatgcatacatacttattcttcattcaagccagccaaacaaggcttggtggaggcggcaaggatgctgccaggaaagacaaggaaggcacgcaacaccggcaaggacgccatctgagcgatggcagggaggccaggcaacaccggcaaggatgccgacgctctttagttttaccgcttcaagaacaggcagcgatgaaccggcctcataacggttcagagggttggcaactgacccgggtgtgcagcgtaaagcaccagaagcagttatccggcagacagggatcgtggtcggaaaaacatcgaggaaagatccgtaccgcgccagtagcgccgaaagatcgaatatggaccgcattactgaaaagcccgggcaaccgggctttttggaatgcctacctacaaaatggatttacccaagagccggccccgcgccggtagtgctcagccaggaggcgtgacatgacaaacgagcagcaagcgttagcggaaatgcctatctggctggtgatcgtactggccctgatcggcggggtctccggagaaatgtggcgcgccgacaaggagggcgcccgcggttggtcgctggtacggcgcctggcgttgcggtccggggcgtgcatggtctgcggggtctcggccttgatgctgtgttacgccgccggcatgtcgatctggaccgccggcgccattggttgcctcaccgccatggccggcgcggacgtggccatcggcctttatgaacgctgggcagccaagcgcatcggggtcaaccaggccccgacctctcgcccggatcagcagtaaccgctgcaaggatgcaagcagatgacacctctcgaaaaaccttcccaactgcccgtggcgattggggatgcgctgaagagtgcgttcccacagcttcgggttggtaatcatcatgacttttctggagcgggcgataaaacgggcattttgatcagcgtggatcgcaacggccctggcattcgctcgcttgcaggacgcaaggcgcacgccttgtcggtttcactcaaggtcatggtcgccggcggctcggcaccgtttgatgcctgcgacctggccagccaactgatggacctggccctggataaccgctggggcctgccgcccgaacaatgcgacctgcccactgcgattgtcgcggcaccttccgtgctcaacggtgcggaaacggattacgacacttggtttgtatcctttacccagaacttctacctcggacggtctctgctcaaaaatcccgcaggcatgccgccttctacggacctgtatgtaggtgggtgtgagagggcggcgaatgtaacgccgcttcctactcaatcacacggaaaaggtggttcagtaaaaggaatttgcagatgttgaaagaattcagatgcggtaactgcaaccgacttctcgcccgtacgggtgggtttacagagctccagatcaagtgtccccgatgcggcacgttgaatcatgtgaaggccatgagcctcgagcaatcgcctttgagcgacatgaatgcggaatcttccgcgaacaatcagtcgactcaataggtgaagatatggaaccagtacaaatcggcagccgtttcaaatcgatcgcaacaagctacgcagaggcagttttcactccggcgcagaacgtcaatggcgcggtagttcgaacagctacgatgatcagccccgtcgggaatggatttattagtacaggcacgaccattccggaagggcgctgggtgacaaacgtgcccgttatcttgtccgccgttggcggttcttccactctcccgttctctgtgaccatccctgccggtcagggcctgtgggtagcaatgactcagaatggcggcggtactgcttatgtgacctacgacctgctgccgtaagtagtagtttctcgggcccaccaaccagaaggtcatgaacctctcccatcgcctttgagcgacatgaaagcggaatcctccgcgacaattcattcgacttaataggtgaacagaaatgcctgtacgcgaacttggtaaaaaattcaaaaaccagaccatcaacgggatgactaatcccatcacggtgctgatctctccagcagataatgtgaatggcgtcatccttcgatctttctacggtgccggcaccatggcttttgggccaaaggttcctaccgtcaaagatcgggacgatagtgttctgcaggaagttgccccaaacgtcctcgcctacaacgatttggccgtaccggctgggcttggtgtctatatctacaacattcagaactacgttctgccaaccaaactgtcgtgggacaccctgaacgcagacggtaccgttgcataggccgcgctgaagggcatagccctgatctcgtactgggcttttaggcaataccgcgcggcataggccgcgcaactatccaaggcctcgccatcgtgcggggcctttccgttttcggctcctccacacacatcgctccgagctgggagtgctggcggggctgacctatttcaaacatgccccacggagtcgagcgcatggagtatctacagcgcctgctcgacaagatcgacaggttcgaattattgatcgcgggcctcgttggggcggtgatcgccagttggtggcacaaggactacctggcggattggcatgcctgggtgatcttcttaatcacagggggggcgcgagttcgttgcacctgactgggatggtcagtgcctatcgcagttccaacacggacgttggtttgtctacctaggggggctttcaaggtgactgtggtgttgataacgcagcctcaattgattcaaatcatgccaggcgctcgccgtatggcgggccttttttcaaccgcgctgaatgcgacttttgctcggtacgaaatcaacagcgtattgcgcgctgctgcttttctcgcgcagatcggccacgagtccggcgaactgcactacgtgcgcgaactcggcagcgatacttatttgagcaagtacgacaccggcacactggctgcgcgcctgggcaatacgcccgaagcggacggcgacggccagaagtaccggggccggggtctgatccagatcaccggtcgccgcaactacctggcctgcagccaggccctgtttggcgacgaacgcttgctgcaacaacccgagctgctggagcaaccgcaatgggcctgtgaatccgccgcctggttctggcaaagcaatggcctgaatgaactcgccgacaaggaccagttcaccaccatcacccgtcgcatcaatggcgggctcaatggcctggaggatcgtttgcagttgtgggcgcgggcgaaggcggtgctatgcgtttcctaggtgtgctttgcgtatgcgtgctggtgactgttgtctggcaggtgcaggcgtggcgatacggggcgcagattgaacgtctgtcggcgacacagacccgggcagcccagcaacaacagcaggccgaacaagacaagcggctggcccttgagcaacaactcagtgccagcgaccagcaacatgcctgggagttgagcgatgcccaacgtactcaaacggctttgcgtgatcgcattgccactgctgatgtgcggctgtcagtccttctcgacgcttccagtggctgccccatgccggccgccaccgccgccggcagcgtggttcatgcagccccgcgagcccgacttgacccagcgcatgctcagcgaattatccgcatcaccgacgacggcgacagcgccctgattgccttgcgtgcctgccaggcgtatgtgcgcgccgtcgcccgttagtgtcttgagacagtccgtcacttgcgtgtgagattgtctcctgtagggtaggcgaacccccgcccacgactggagacgaccgtgaaggaaatcactcaactggctgccgaactgggtcgccgcctgcaggtgctcaacgcccacgtcaccacggccgagtcgtgcaccggcggcggtatcgcggaggccatcacacggattccggggagctcggcctggttcgaggcgggttatgtcacctattccaatcggcagaagacccggcaattgaacgtgccggaagccttgtttgcaaaagtcggggcggtcagccaggaagtagtcgaggcaatggtccgtggcgcccaggaaaaaagcctggcgcggtttgccgtggcggtcagcggcgtggcgggaccggacggcggttcgccggataaaccggtgggcaccgtatggctggggtttggcgtgggggaagaggtcacggtcgagcttgagcacttcactggcaaccgcgaggaggtccgccgacaaacggtaaaggccgcgctagagggcttgttgcgacgagctgcagcagaaatagaaaatcaggggtaggcgatccctgatctttgtggaacaatactgtctacttatacaggtgttggccgaccaggccttattgattacgtgaggactttaatggacgacaacaagaagaaagccttggctgcggccctgggtcagatcgaacgtcaattcggcaagggtgccgtaatgcgtatgggcgatcacgaccgtcaggcgatcccggctatttccactggctctctgggtctggacatcgcactcggcattggcggcctgccaaaaggccgtatcgttgaaatctacggtcctgaatcttccggtaaaaccaccctgaccctgtcggtgattgcccaggcgcagaaaatgggcgccacctgcgcgttcgtcgatgccgagcacgccctggaccctgaatacgccggcaagctgggcgtcaacgtcgacgacctgctggtctcccagccggacaccggtgagcaggccctggaaatcaccgacatgctggtgcgctccaacgccatcgacgtgatcgtggtcgactccgtggcagccctggtccccaaggctgaaatcgaaggcgagatgggtgacatgcacgtgggcctgcaagcccgtctgatgtcccaggcgctgcgtaaaatcaccggtaacatcaagaacgccaactgcctggtgatcttcatcaaccagatccgcatgaagatcggcgtgatgttcggcagcccggaaaccaccaccggtggtaatgcgctgaagttctacgcttcggtccgtctggatatccgccgtaccggcgcggtgaaagaaggtgacgaggttgttggtagcgaaacccgcgtcaaagtcgtgaagaacaaagtggccccgcctttccgtcaggccgagttccagattctctacggcaagggtatctacctgaatggcgagatgatcgacctgggcgtgctgcacggtttcgtcgagaaatccggtgcctggtatgcctacaacggcagcaagatcggccaaggcaaggccaactcggccaagttcctggcggataacccggacatcgccgccacgcttgaaaagcagattcgcgacaagttgctgactgcagcgccagacgtgaaagctgccgccaaccgcgagccggttgaagaagtggaagaagctgacactgacatctgaagcaaacgatgactgttgtactggatacactcgtcgccgttcggcgcaccgcaatggacctgctcgctcgccgcgagcatggtcgagtcgagctgacgcgtaaactgcgtcagcgcggtgcggagtccgagatgatcgaaaccgccctcgaccgcttgacggaagaggggctgctttccgaatcccgttaccttgaaagttttgtctcctaccgggcgcgttctggttacggcccggcacgcattcgtgaagaactgagccagcgtggcctgcaacgagctgatatcgaccttgcattacgtgagtgcggcatcagttggcaggcgcagttggaagacacctggcgacgcaagttttctggccatcttcccattgatgccaaggagcgtgcgaaacaggggcgtttcctgagctatcgcgggttttcgatggagatgatcagccgcttattgagcggtcgggatatggacgactaaacaccttgctgtgctggccgcattggcgaacagactttctatggcgagcggatttgctgtggtgactgggcttgttgcggtgagcgggcttgccccgcgttgggctgcgcagcagccccaaacccctcccctccgctgcacccgaaacaccaccaaaaagacccactatgaaaatagtgggtctttttttttgccctcaaaaaatcacgccggctccggcgcaacccgctgctgcgccttcccctgagcctgcgcccagttctccggcaggttgatgtaatccaccaactcccgtagccggccctgatcgcgaccattgaagttgaacaccagccgcgtcaaatggctgaaccgtggctcatcatgttcctcgccggtgtacgcgagctgttgaaactctccgctcaaccgcaggctggaaaattcagtctgcaaatgggccaatgccccatcgctgagcgggtgatgcatgcgcaccacaaactcacgcttcaaccagcgggtggagtggaagttagcataaaactggttgatctcttccaccgcctcttcggcgctgtacaccaggcgtatcagcttgagatcggtaggcaggatgtagcggttggcttccaactgactgcggataaagtccagggcgccttgccagaacccgccgcctggcgcgtccagtaacaccaccggcaccaatgggctcttgcctgtctggatcagggtcagtacttccagtgcttcatccagggtgccgaaaccgcctgggcacagtaccagcgcatcggcttccttgacgaagaacagcttgcgggtaaagaagaagtggaaggacagcaggttctcggtgccatcaatggtcgggttggcgtgctgttcaaacggcagggtgatattgaaccccaggctgtgttccaggcccgcgccttcgtgggcggccgccatgatgccgccgccaccgccggtgatcaccatcaaatcagaacgtgccagtgcagcgccgacttcgcgggccagggcgtacagcgggctttccaccggagtgcgcgctgagccgaataccgttactttgcggcggcccttgaactgttcgagcacgcggaaggcattgtccagttcacggatggcttgcagggtgatcttggcgttccagcgattgcggtcgtcctgggccatgcgcagcacggtgaggatcatgtcgcgatacaggggaatattcgggctgttgggagcgatcagctggagttgggcgtcgacctgctgcgtaaggtcagcaccgttttcttcaaagtgccgaagcaggcggtcattcggttcgtaaggcattcaacttctccttattgcagggcccgggtggccgacgagccgttcgccggaggctacgacactgcatgtgtcgttgcttgccgcagggggcaaccttcttttgccctgaaaatgttacagaacagcatgaaaagtgctgtgaatgaatggtcgggatgacttgatcatgggccgcaaaacccttggctggcaaccgcttattggtcactcgtcagggagtttagctgttggcaggatgttgaagcggggaagtgcgcgccaccgggcggcagcgcgcgaaggtcacgctgttactttttcttttttgccgccgccggtgccgggcaatccgcttcgatgaacttcaccgaggccacaggacggttggtcttgttctcggtgatttcgtagcgcatcactgcgcccttggccatcagctcgcggtagcccttgttcaggcacacgctctggcccagctggaaatacaccgccttggggttggcgcgcatctgttcggcgcggtcaggcaggacgctcaggtgatcgatcagttgcatgccttccacggtgtaggccacttccagggtcttttcgtcgatttcccggggcaggtccttattactttcggccgcgacgctttgcagcttccggttcatttgggcctccagcagcgaggccgcctgggcgcacacgggcaataccagcgcgagggcgacggatggggcgacaaaacgcagcatggaacgcagcatgaaactctcctgattcggttactggtgcatagaccagccactgcgctgtgcgttcagtggcgcgcaattataggtgagcccttgccactacagccaggcgtatcgctggtaaactgcggccacttccgccttccacgagttttcaccgtgtcgatttacccgtcccaacggcatagccgatgagccacgccgtttcccgcctgcgcacccagcgcctggcccgtgccgtgcggccgttcctcaatcgtggctcgcgtgccgaacgttgccccggctgccgggtcatccccgaatactgcctatgcgcctggcgacccaaggtcgaagcgcgctccgccatgtgcctgctgatgcatgacgttgagcccatgaagcccagcaacaccggttggctgattgccgatgtcatcaaggacaccacggcattcgcctggtcgcgcactgaggtcgaccctgaactgctcacgttgctcgccgatccgcagtggcagccctatatcgtgttccccggcgaattcgtcgtgcccgagcgcgtcgtcagtgaagtcaaggtggaggagggcaagcgcccgctgttcatcctgctggatggcacttggagtgaagcgcgcaagatgttccgcaaaagcccctacctggaacatttgccggtgctcagcctggcgccggaacagctgtcacgctacaaactgcgccgttcaaagcgtgatgaccacttctgcaccgctgaagtcgccgccctgtgtctggaactggccgatgatccagtcgccagtgaagtcctggacgcctacctggatgtcttcagcacccattacctggccgccaagttccagatgccgctggatccgacggacactgtgcatacgcgccttgcgccctatattccgacggcgtaaccagacgacgtttgcatgatggcaccacgcacccgcaacccgctaaaatgcccacgggcgtagtgcttgaccctccaggctacgctgggcatgctgggcgccgatcagggcccccctaaaaacaggatcatttaaacaatggccacatacgaaatcctgatagccgatgaccacccgctgtttcgcagtgcgttgcatcaggccgtgacccttggccttggcccggacgtgcgcctggttgaagtggccagcattgctgaattggaagcccgcctcaccgaaaaatccgactgggacctggtgctgctcgacctgaacatgccgggcgcctacggtttctccgggctggtgctgttgcgcggtcaatacccgcagatccccgtggtgatggtctcggcccaggaagaggccgacgtggtggtgcgctccaaggagttcggcgccagtggtttcattcccaagtccagtgcgatggaagatatccagaaagccgtgcgcactgtgctggatggcgacgtgtcctggccgccgcaggcttttgaagaaatcaacgtgtccgacgaagccaaggctgcccgtgatggccttgccagcctgacgccccagcagttccgggtgctcaccatggtctgcgaaggcctgttgaacaagcagatagcctatgagctgagtgtgtcggaagcgacgatcaaagcccatgtgacggcgatcttccgcaagctgggcgtacgcacacgcacccaggcggcgctgctcttgcaacaacttgagtcaatttcgcagcactaacgtgtttccgattcacgcttttttgactttgcgtgatctagttttcccacttctttggttcagttgcctacatctatgtcgcctttcaagggtcaaaccggtatcaaacgtatcttcaatgctgggggatattccctggatggtctgcgcgcggcgtttaccggcgaggcggccttccgccagttggtgttgctcaacgtgatcctgatcccggtgagcttctttctgaatgtcagccgggtcgagcgcgcgttgcttatcgccgtatgtttacttgcgttgatcgtcgagttgctcaactcagcggtagaggctgcgatcgaccgcatctccctcgaccgccacccgctgtcgaaaaacgccaaggacatgggcagcgccgcgcaattcgtggcgctgaccatgatcaccctggtgtgggccgtgatcctgatctaagcctcaggcaatacttggcaacacgatctcgtcgctgcgctgcaccccggcggtgaaggcgcggcacagttcgaggaattcgcgcatcgccgaggtctggtacttctgtttatgccagatgaagtagaactgccgagccaggtccaggtccggggtttccaccggcaccaggctgccgcggcggaacgcgtcgcgcagcgccagtcgcgaaatgcagccaatccccagtcccgattccaccgcacgcttgatcgcctcggtgtgttccagctccaggcggatattcagcgcgctacggtgatggcgcatggcttggtcgaaggtcaggcgcgtgcccgagccttgctcccgcaggatccaggcctcgtgggtcaactcatccatgctcgccacgccacgcttggccagatgatgctgcggcgcgcaaaacaccaccagttcatcttccacccaggtttgcacctcgatatccgggtggctgcagtcgccttcgattagacccaggtcaatttcgtaatgcgcaacttggtgcacgatatgtgcagtgttctgcacatgcagtttcacctggctctcggggtgctgttgcatgaagctgccgatcagcagggtggccaggtagttgccgatggtcagtgtggcgccgaccgccagggagccgaagccggacttgccgttgagcaggtcttcgatctccttggcctggtccagcagcgctaccgcctggggcaacagttgatgaccgagcgcgttgaggctcaggcgtttgcccgcgcggtcgaacaattggcagctggattgacgctccagctcggtgatcgaggtgctggcggcggattgagataaggccagaaggccagcagcgcgggagacgctttcctgctgggcgacggcgacgaagacttgcagttgacggagagtaaatcgcatatcgatataaccgataacccttatcttaataatccagttaacagatattgtcgccgccattagaatgctgtgcaattgcgcaactacatttggcgcagacccatttccaggagtcccccgtacatgagcaacatgaaccacgagcgtgtcctcagtgttcatcactggaacgacactctgttcagcttcaagtgcacccgcgatccgggcctgcgcttcgagaacggtcagttcgtgatgatcggcctgcaacaacccaacggccgcccgctcatgcgcgcttactccattgccagcccgaactgggaagagcatctggagttcttcagcatcaaggtgcccgatggcccgctgacttcccaattgcagcacttgaaggaaggcgacgagatcatcatcagcaaaaagccgacaggcaccctggtgcttgacgatttgaagccgggcaaacacctttacctgctcagcaccggtactggccttgctccgttcatgagtgtgatccaggacccggaaacctacgagcgtttcgaaaaggtgatcctgtgccacggcgtgcgttacgtcaacgaagtcgcctaccgtgaattcatcaccgagcacctgccgcagaacgaatttttcggcgaggccctgcgtgacaagctgatctactacccgaccgtgacccgcgagccgttcgaaaacgaaggtcgcctgaccgacctgatgcgcagcggcaagctgttcagcgacatcggcctgccgccgatcaatcctgaagacgaccgcgccatgctgtgcggcagcccaagcatgttggatgaaaccagcgaagtgctgaacagcttcggcctgaaggtttcgccacgtatgcgtgagccgggtgattacctgatcgagcgcgcattcgtcgagaagtaagaaagtcaggcaatatgctgactgggccacacagaacatccaaatgtgggagggggcttgcccccgatgagtgcgtgtcagttgatacatctgtagctgacacaccgctatcgggggcaagtcccctcccacattgggttttcggtttatccagccggtagcacttccaacacacaaatcacccccgcctctggatagtgccaacgcacatccacatcccagaactgcgccccgtattcccgctccggccccggcacctgatacgccggccgtggatcctgcgccaggcactgatcaatcagttcaaccagcggctcgccaaggcgctgagcatgctcttgtgcctgttgcagcgcagtcttcagccactgcacggggatcagctgcggcgctgtgctggcgatgctgttggtggctgtgtcgacaatgtcggcatacggcacatacggcttgatatccaggataggcgtgccatccagcaagtcgatccccgagacccacaggcgccccggttccaccttgtccagcttgactactgactggccgattccgttggggcgatgggtcgcacgggtggcaaacacgcccatggatgtattgccgcccaggcgcggcgggcgcactttcaggcgcggcttgtcttccagtgcctggtgaaacaggaacagcaaccacacatggctgacctgctccaggccttgcaccgcttcacctccatcgaacggcgccaccagctccagcacgccacgggcggccggcgccaactgcggttggcgcgggatggcgaacttctccttgaagcaggagcgtacgaaaccgacgggtgagacctggtaactcatggcttacgcacgaacccgcagggtcaggcccttgaggaaattacgcagcaactggtcgccgcacggacggtagttggtgtggccgaacttgcgaaacagcgcgctcagctccggcttggacaccgggaactcggcggccttgaggatggcgtgcatgtcgtcttccttcagctcgaaggccacgcgcagtttcttgaggatgatgttgttggtcaccggcgtttcgatcggctgcggcggacggctttcgtccttgccgcgcttgaagatcaccaggccatcgaggaaatgcgccatgacgtcgtccgggcagaacacgaagccttcttcctcgtccttcttgaggtaggtgagcaggtcgtccttggtcacgtccatgccgccgagcttgatgatctcgaccatcttgttgtcgctgatgtcgagcatgtagcgcacgctgcgcagtacgtcgttgtgaatcatggtgggcaatcctggtattcaactgaggacaccgccagtcaggcggtgtcggaaaagggcggcggcttagaacttctctttgccgctcaggtaacgccactggccgaccggcactttgccgatggacacgccaccgatgcggatacggcgaatggcgatgactttgaggccaaccgcttcacagaacagcgcgatcacgcctggctgcgggtttttcatcgcaaaacgcaggcggttttcgttctgccagctggctttgaccgcaggcagctctttgcctttgtaggtcaggccgtggttcaggcggttgaggccgtgggcaaccatatcgccttcgacctccaccacgtattcctgctcgatcttggccgcatcggcggtcaacttgcgcaggatcttccagtcctgggtgaacaccagcaggccgctggccttggcttgcaggtcggcgctggcggtcaggcgcaggaagtgccccttgagcgggcgcttgccgaagcgatgttcttccgagagtgtttcggcgctgatcgacgccatggccgtttcggcatccacgccggccggggcgtgcagcaggatggtcaccggttcgggcgcggtggccttggcctccgggtcgagttcgactttctgggtggtgaccttgaactgcggttcgtcgatcacttcactgtccaccgagacccagccgccttcgatgaacagctcagcctcccgacgggagcaaccgaccagttcgataaggcgtttggagaggcgtatggggtcagtcatgacaagggccgtaacaaaagggggcggctattgtacctgtgtgggcgcggttaatcccggctccatttcatttagccttggcgggtatgttgttgtatctggcgcaaacgcatatgcagtaacggataaggctggccgagcccatcatgctccgtgcgtccgatcacctcaaagccttgtttgaagtagaagcccagcgcctggtggttctgttcgttgacgtccagcgcttcggcgttcaagtgctcgattgcataccgcagcaattgccggcccaggccaccaccccggtgctgcgggtcgataaacaacatctcgaccttgccagccgctaccccggcaaacccagtgatgcgttggcgggcgtccttggtgcagatcagcatcacggcatccaggtagcgggacagcaccaggtttttcaacaactcgatgtaagtgtctggcagaaagtcatgggtggcgcgtaccgaggcctcccagatccgcgccaactcggggtagtcgctggttttaggtgtgtggataaccgaatgctgacgcatgcccgctgccccttgccgatgttcggcgctgatgggcaaaacgatagacctaaaaaagccccgcatcttgtccagaagcagggctttttgatttttttacgccgatcagtcgcgcttttcagcccacaggtcgtattcatcggcatcggtcacggtgcaccagaccttgtcgcctggtttcaaaccgctggcatcgtcgatgaacacgttaccgtcgatctccggcgcatcgaagaagcagcggccaacggcgccttgctcgtcgacttcgtcgatcagcacttcgatctccttgccgatacgcagttgcaggcgcgccgagctgatggcctgttggtgcgccatgaaacgctcccaacggtcctgcttgacgtcgtccggcaccacggccaggtccagcaggttggcgggggcgccttccaccggcgaatactggaagcagccgacgcggtccagttgggcttcggtcagccagtccagcaggtactggaaatcttcttcggtttcgccggggaagccgacgatgaaggtcgagcggatgatcagctccgggcagatctcgcgccaattcttgatgcgcgccagggtcttgtcttcgaaggccgggcgtttcatggccttgagcactttcgggctggcgtgctggaacgggatgtccaggtacggcaggatcttgcctgcggccatcagcgggatcagctcgtccacgtgcgggtacgggtagacatagtgcagacgcacccacacacccaggctgctcaaggcttcgcagagttcggtcatgcgggttttcaccggtgcgccgttccagaaaccggtgcggtatttcacgtcgacgccgtaggcgctggtgtcctgggagatcaccagcagctctttgacgccggacttgaccaggcgttgggcttcgtcgagtacgtcaccgaccggacggctgaccaacttgccgcgcatcgacgggatgatgcagaagctgcagctgtggttgcagccttcggaaatcttcaggtacgcgtagtggcgcggggtcagcttgatgccttgcggcggcaccaggtcgatcagcgggttgtggtcctggcgcggtggcaccacctcgtgcacggcgttgaccacctgctcgtactgctgcgggccggtcaccgccagcacgctcgggtgcacgttgcggatattgccttcttccacacccatgcagccggtcacgatgaccttgccgttttccttgatggcctcgccgatcacttccagggactcagccttggccgagtcgatgaagccgcaggtgttgaccaccaccacgtcagcgtcctggtaggtggacacaacgtcgtagccttccatacgcagttgcgtgaggatgcgctcggagtcgaccagagccttcgggcaacccagggaaacaaagccaaccttggggttggcttttgcgatggtggtggacatgtctaacctcggtattgaatgacgccgcccgtcgggcacgacagggctgcggacgggcgcttggtgcgcctctgatcaaaaagtgcgcaattctagcgatgggcagcgcacttgaccagctttatgcagggaaatgcgacgagtgctgttttgggccattcaagcggtccttactctacctttaggctcggaggtcctgctctgtacggtgcgctacaactttagacatgcctacacctaaagcctgaagtactttcaggagggtggagagcttagggtcgccgccgacggcgatggatcggtagagattggctctattgagccccgtgttctgcgacaaactgagcattccgccacgagcttccgccactcgacggatagcaacgaggaaggcgtcctcaccacccgcttcatcgatttcctcaagcgcgacagatagatactcgagcgcaaacgcttcgtcgtcgcggagcatttcaagaacgctgtcttcgtgagagcgcgtacgaatggtcatttttgctgcaccttgtaagatttccagagagctttggcctgatcgatgtcgttctgctgcctggcctctgagccaccgcccaacaggaaaataattttccgatcctggattgcgtaatacacgcgaaaaccaggcccgaagtctagcttcatctcaaagaccccttcacccacaggttcggtagcgccaaagtgaccgagggacgctcgatctactctggtggtgattcttgcttttgaacgtgtgtcctgcacggtgtctagccaggcttggtatatatccacgccgttgactgagagtacgtgtttcacttcgtacatgaggactgtaccttaaaagagacagagtgatgattgagtttctgtatcgaatgggcgcgccaacaagcagaggcaagatttattgctcaggtgggccggccaaggagctctcgattacgccgtcgatgcggcactgcggaggcgggccgaatatacggttgagcgtagatgtgatcaatgcaggcaaaaaggctccaaagtgccttgccctctatgagcggttgcacaaaaccccacccaaatcacttgaacagcgaaatgcgacgagtgctgcgctatgcttcgcgccgttgtgcgtaggtaaaaccctaaggtcaacaaaacgtctgttacgagaagtaaaacggcgcatgctagggtcagcttagacgcgttgttaataaaagaccgcaggtcaaagggcaggagtggttgatgggtcacgcgagtagtcaggcagcaggtgccgagcagtcaaacgccaagccgattggcatgctggtggcagcggtcggggtggtttacggcgatatcgggaccagcccgctgtacaccctcaaagaggtgttcaacggcggttatggggttcaggtcaaccatgatggcgtgctggggatcctagcgctgatcttctggtcgctgatctgggtggtctcgatcaaatacatgctgttcgtgctgcgcgccgataaccagggcgagggcggcatcatggcccttacggctctggcacggcgggcggcgggggagcgcaagaagctgcgcagtttcctcgtggtgtgcggcctgtgtggcgcggcgctgttctatggcgacagcatgatcaccccggcgatttccgtattgtccgcggtggagggcctggaactggcgttcgatggcctggagaaatgggtcgtgcccatcgccctggtggtgctggtggcgctgttcctgatccagaagcacggcaccgatcatatcggcaagctgttcgggccggtgatggtgacctggtttctggtgctcggcggattgggagtgtatggcatcaccctgcaccctgaagtactcagtgccatgaacccgatgtgggccatacgcttcttcgaggctcaccccggcattggcgtagccatcctcggcgcggtggtgctggcactgaccggcgccgaagcgctgtatgccgacatgggccacttcgggcgcaaacctattgcccgggcgtggttcatgctggtgctgccggcgttggtgctcaattatttcggtcagggcgccatgctgctgggtgatccggaagccgcgcgcaacccgttctacctgctggccccgagctgggcgctgatcccgctggtggtgttgtccaccctggccacggtgatcgcgtcccaggcggtgatttccggtgcgttctcgttgacgcgccaggcgatccagctgggttacatcccgcgtatgcatatccaacacacctccagcgccgaacagggccagatctacatcggtgcggtgaactggtcgctgatggtcggtgtgatcctgctggtgctcggcttcgaatcctccaacgcactggcatcggcctacggcgtggcggtgaccggcactatgctgatgaccactatcctggtgtcggcggtgatgctgctgctgtggaaatggccaccgatcctggccgtgccggtcctggtctgctgcctgttggtcgacgggctgtattttgccgccaacgtgccgaagatcatccagggcggcgctttcccggtgctggcggggattgtgctgttcgtgctgatgaccacctggaagcgcggcaaacaactgctggtggagcgcctcgacgaaggcggcctgccgttgccgatctttatcggcagtatccgcgtgcagccgccccatcgcgtgcagggtaccgccgtgttcctcaccgcgcgcccggacgccgtgccccacgcgctgttgcacaacttgctgcataaccaggtgttgcatgagcaagtggtgctgctgacggtggtctacgaggatattccccgcgtaccggctgcacggcgcttcgaggtggactcctacggcgaaggcttcttccgcgttatcctgcactttggttttaccgatgagccggacgtgcccgaagcgctgaagttgtgtcacctcgatgacctggatttcagcccgatgcgtaccacctacttcctcagccgcgaaacggtgatcgcctcgcgcatcaagggcatggcccgttggcgcgaagggttgttcgccttcatgttgaagaacgccaacggcaacctgcgcttcttcaagctgccggtcaaccgcgtgatcgagctgggcacccaggtcgaaatgtaagcggcagtcacacgggagccggcaatcggctcccgcttttccttctgaaccctgtgcaatccagcgttgtcgactaggctctaagcaccgtttgaatagtgcccacagaacccagaagaggtgcgccatgagtcagctgctcgaaccctataccctccgtcaattgaccctgctcaaccgcatcgcggtttcaccgatgtgccaatactcaagcgacgacggcctggccaatgactggcacctggtgcacctgggcagccgtgccgtcggtggcgccgggctgattttcaccgaagccaccgccgtgaccgccgatggccgcatcaccgcccaggaccttggcctgtggaacgatgcccagatcgaaccgctgcaacgcatcacgcgtttcattgcggcccagggcgcagtggccggcattcaactggcccacgccgggcgcaaggccagcacccaccggccgtggattggcaagcatggcagcgtcaagcccgaggatggcggctgggtacccgtgggaccgtcaccgattgccttcgacccccagcacacccaacccaagcagttggacgaagggcagatccagcaagtgattgccgattttgtcgccgcagccaagcgcgcattgaccgccggtttcgaagtggtggaaatccacgcggcccatggctatctactgcatcaattcctgtctccgatcagcaaccaacgccaggaccagtacggtggctcgtttgaaaaccgcatccgcctgttgctgcaagtgaccaaggcagtgcgtgaggtctggccccaggagctgccgctgtttgtgcgggtatcggccaccgactgggtggaagacggctggaacccggatgaaaccgtggagttggcacgtcgcctgaaagacctgggagtggacctgatcgacgtttcgtctggtggcaccgccgccaacgccgagatccccaccggtcctggctaccagacccgcttcgccgagcgcgtgcgcaaggagtcgggcatcaccaccggcaccgtgggcatgatcaccgagccggcccaggccgagcacatcctgcgcacgtgccaggcggatatcatcttccttgcccgtgagctgttgcgcgacccgtactggccgttgcacgccgatgatgacctgggtgggcgcaaggcaatctggccggcgcagtaccagcgcgcaacccatcgtgaccagcccattcatgaatcagatttgagagattgagccctgacacgctccgccgaaacccaccctcacccggtgggtttttttgcgttcatagcgtgggatcacgctgtaggtatttgttaccgatgtaattatttaagtgattactctaaaaaaatcgcacgctcggcgagatcgtttctacgcttagggtaagcctgatttctggcccaggaagtcagtcggttttcccacacagacgttgcgctttagggagaagggtaatgggcaccaggagtatttgatggatatcaggagaagcagtccatggccaagtcctatggtgtagcgggtgcggtagcgtcttttctgacccgcagggtgtctttgcgcgggcgaaggttgagctcggatgaagaggagttgctggcgcagtaccgcgcactgaccgagaacgatcaggtggcgatgcgttatttgattggggcgatgaagagtgtgtcgcggttctgaaacgaggagggggcgttcccacgcaagcgtgggaacgcggtgcatcaggtgtacttgcgctggtccggtgccggcgggaagtactggtacagccaggtttcgctcaaggtgcggtcctgggtgcgaatgaacaggcgcagttccaccggctccacgctgtcgctggtcgggtaccagtcgaacaggatgcggtagcccttgatgttatccagtaccagcacgctgaagtccttcacctggccatgggaacaggtcaccaccggctcgatgccggtgcctggcggcaggcgatccaggccgccgcccttgaagtccacggcaaagcggcgcgcccagacttgcgggtagtgctcacccggtgcccagccttcggtgaagccacccatgcccgagcgggttgcatcgacttgcgccaacggcgtgctcaccggcggcagcgcgctccagtacaacttgtagccatagttgagtgaatcgccggcggccacgggttttttcggagtccagaaggccacgatgttatcgagcgtctcgccggtggtagggatttccagcaggtcgatcgagccttcgccccaggcggtggtcggttcgacccacaggctcgggcgcttgctgtaccagtccacggtgtcctgatagctggcgaactcatggtcggtctgcaccaggccgaagcctttcgggtctttatcggcaaacgcgttgaattgcagcttggccggattgttcagcgggcggcagatccactcgccgttgccgcgccacatggccaggcggtccgagtcgtggatctgcgggtggatggtgtcgcacatgcggcgctcgtgggtgccgcaactgaacatgctggtcattggcgcgatgcccagttgttcgatggtggtacgcgcattgatatgcgcgtcgatggccatcaccacctggttggcctggcagtcgatatcaaagcggtacgcgccggtggcgctcggcgagtcgagcagggcgtagaccacgaagcgggtggcgttcttgtccggggtttcgaaccagaactgcgtgaagtcggggaactcctcgcgttttttcgcgtaggtgtcgatggccaggccacgggcggaaaggccgtactggccggtggaatccaccgcacggaagtagctggcaccgaggaatgacagcacgtcatggcggtccagctccggcgccttgaacagcttgaagccggagaagcccaggtcgccggtcagctgtttggtgtcgaccgtggttttttcgtagttgaacagcgaaggacggaaatgcacctcacgggcttcgcgggtcttggggtcgacgctgtgcatgcgcaccggcgtcttgaagcccatgccgacgtggaagaactgcacgtccagttggccgttcaattccttccacagcgaatggttgccgtcgtagccgatggcgttgaaattctgcggggtcatggtcgccagcgtgggcggcagcacctgtttggtgtccttgtaagcggtcccggcgagttgtttggcctgggccttgagcgtgtcgaagtcgaacgccacggccttgccatcggcagcacggttcccggcccaggcctgggcggcgagcaggccgctggccgacaaaccggtgtaagccgcaatggccatggacgctttgagcaaattcctgcggtgcatagagacaacctgtcgtgagcaaatcccgcgccgttcctggcgcgtagcggatcagaaattacggttcggacatgccttcgaccaaacgcaacggacattaaacagacgccggatagcttaagcggttcgatgacgtaggaaaattgattgatagcggcacgatggcattgcatatgcgacaagacatttccaattctgtggccaaaacactacttacgaaatatgaagatccaaatgtgggagggggcttgcccccgatagcggtatgccagtcactgaatactgcgcaggtccaactcaatcgggggcaagccccctcccacatttaggctgcatttcaggcgacttcacccactgctctgaacgcctcatcaatcgccgcatgggcatacgcactccacgccgcgtccgagttggcgatgctcacatgccccagcggctttttcgccagcttcatccacgcttcggtttcatcggcatcatcgaacaagctgttggagaagctcgcataaccgtgtgaccagcggttgacagtgatcgccagaatatcggtctgatggttgaaaccacccgggccaagcatgcgttgcagctggtcacgcaactgcgtttccaactgttcgaaggtctggccatacaacttgccacgcccggcgcgggcctggtcgcgggcgttcatgccgctgttggggctggtgggcacgtagaccatgtgcaagccgatcggctgcgtcgggtcgcgcgggtggtcatagccgcccatgcttaccgggtagtccagtttgatccggctgtagggctgggtcgccgcgtaaatctcgtgcacgccgagcttctggaacgactgccaattgcggatcaccaccttggtgtacaccagcgggtacttcacgttctggctcagggcgtgagcttgcggtgccggcaaatctttcaacagatacggaatcatcatgttgtagcaggccaggatgcagcgtttgccacgcacttgtgcgagttgtccgccacggctgtagccgatatgcacgccgtcgccgacattacgcacgctgaccgccgtgctgttcagtcgcaggcgtacggcggccttgggctggtcgagcttggcgtagtcgaacgccgccagcacgatatcgtccatggtgtgccctggtgccacgcccgggatcaggctgcgtaccagcaagcgcgccaccgatgcattgccgtccgggaagtgatagatgtagggctcttccatttcagcagcggcttcttcgctgatcggcgccagattcatcccggcaaaacctgggaaacccacgttgtaggcatcggccgacgccacggcatcaatgctcagcgccatgaagtcattggtgcggctctggaagtacttcactgcgccttccgacaggcctacgttcttcagcaggaaatcgcggtagctggtggctgccaaatagtcggccttttctttggcggtcttacctggcaggtagtctttgggcgcggtgtgcaactcgatcaaggcctgacggtctgccgccggcaacgggaagtcattgatgaaatcgcggagggctcgtgcgttgagttggtcgggggcgatgtcgtcggcgaccattggcgtcgggtcgccggtcaccagcttgtcttcgccgaagttttccttgtcgaaaaacaccccgcgcgacagcccgaggccagggtagaactggcggtcgaaggcggtttcgaagcgcttgatgttcacgccgagctttttcaacagcccgttcacttccttgctgtacaggtggttgggcgactggaacgcctcgctgccaccgtagccgatgatcatgcggccaccggcctggaattcattgcgcttggcgtggccgccgaagtcgtcgtggttttccaggatcaggatcttcgccttggggtgcttctcgcggtagaaccacgccgccgacagcccactcaggccgccacccacgaccaccaggtcatagtactcggtgatcggcagcttgtcggtgtcgaacaccttcttttcccagcccatctggtgcgccacttcgaacgaaccggcgtggctgccgcgcaggccggtcagggcaggagggtagtaacgaccgtcgggggcggcttgcaggatttgcagtggggtcatgccggcggcgatggtgacagcgacgccgttgaggaagtcgcggcgggtgatatccatgggggatcctgagcattattgttataggttcccggcatccaggaaggatgccgggttgaatcgtcagtgcttgaacatcacatgccgcacggtggtgtagtcctccagcccgtacatggacatgtccttgccatagccggacagtttctgaccgccgtgaggcatttcgctgaccagcatgaagtgggtgttcacccaggtgcagccgtactgcagacgtgcggccaagcgatgggcgcgtcctacatcggcggtccacacggacgaggccagcccgtagtccgaatcgttggcccagcccagcacctgagcttcatcgttgaacttggtcactgataccaccggcccgaagacttcgcggcgcacgatctcgtcgtcttgttgcgcgtcggccagtacggtgggttcaaagaagaagccattgccttccacggccttgccgccggtcaccaggcgaatatgcggttgtgccacggcccgctcgacaaacccggcgacacggtcgcgatgctgcgcggtgatcaatggccccaactcggtggccgggtcatcctgcaatccatatttgatactggcgaccgccacgccgagtttctcgacaaacgcatcgtagatatcggcctgtgcataaatacggcacgccgcggtgcaatcctgcccagcgttatagaagccgaaggtgcgaatgccttccacggcggcgtcgatatccgcatcgttgaagatgatcaccggcgccttgccgcccaactccatgtgcatgcgcttcacgctgtcggcggtgctggagatgatgtttgcgccggtggcgatggagccggtcagcgacaccatgcgcactttagggtgcgtcaccagtgggctgcccacggttggcccacggccaaataccaggttgagcacaccggccgggaaaatatcagcggccagttcgaccatgcgcaaggccgtcagcggggtttgctccgacggcttgagcaccacggtattcccggcggcgagggccggggcgattttccaggcgaccatcatcagcgggtagttccacggcgcgatggacgcgatcacgcccaccgggtcgcggcggatcatcgaggtgtggccgggcaggtattcaccgccggccgaaccgctcatgcagcggctggcgccggcaaagaaacggaacacgtcggcaatcgccgggatttcatcgttgagcgcggcgctgtagggcttgccgcagttgtccgattccagcttggccagttcttcgccgtgggcctcgatcacgtccgccagtttcagcagcagcagcgaacgatccttgggtgcggtttgcgaccagccttcgaaggccgcatcggcggcgcgtacggcggcgtcgacctgggcttcgctggcttccttgatttctaccagtacgcgaccgagcgccgggttgaatacagcctgcgccgggccttcgccttcgaccagttggccgttgatcagtaatttggtttgcatggttcagctctccaccaactatcgttatttccttgaataaactggctctaaatgtgggagggggcttgcccccgatagcaatcttccagtcacaccctctacaactgacccactgccatcgggggcaagccccctcccacatttgaaccgtgttccttcaatagcatcgttatttgccgccactcccggccacgctttcaccgccgcgggtcaggtaataggcaccgagaatcgggaacatcgtcaccagcatcaccagcatcgccaccacattggtcaccggcacgtcgcgtgggcggctcagttggttgagcagccacagcggcaaggtgcgttcgtggccggcggtgaaggtggtgacgatgatttcgtcgaacgacagcgcaaaggcgagcatgccgccagccagcagcgccgagcccaggttgggcatgatgatgtagcggaaggtctgccagccgtcggcgcccaggtccatcgaagcctcgatcaggctgtgggaggtacgacgcaagcgggcgatgacgttgttatagacgatcaccacgcagaacgtcgcgtggccgacgatgatggtgaacatccccggttcgatgcccagcgtcttgaacgtcgccaacagtgcgataccggtgatgatccccggcagcgcaatcggcaggatcaacatcagcgacacgccttgcttgccgaagaactcgcggcgatacagcgccgccgaggccagtgtaccgaggaccatggcgatcagcgtggcgatggcggcgatctgcagcgacagcttgatcgcctccagtacgtccggccgcgcaaacgccacgctgaaccacttcagggtgaagccctggggcggaaagctgaacgcggcttcttcggtgttgaaggcgtagaggaagatgatcaggatcgggaagtgcagaaacaccaacccgccccaggcggcgatcttcaggcctagtgaggatttttcagagtgcatcgaaggcccccaggcgtttgacgatggacaggtaaaccgcgatcagcacgatcggcaccaaggtgaacgctgcagccatgggcatgttgccgatggcgccttgctgggcgtagaccataccgccgacgaagtagccgggcgggccgaccagttgcggcacgatgaaatcgcccagggtcagcgagaaggtgaagatggaaccggcggcaattcctggcaccgacagcggcaaaatcacctgcatgaaggtctggcgcggtttggcgccgaggtcggccgaggcttgcagcagcgagggcggcaagcgttccagggacgcctggatcggcaggatcatgaacggcagccagatgtagacgaacaccatgaagcgccccaggtgcgaggtgctcaaggtactgccgcccacgccggggatgcccagcacgaactgcaacaccggctccaggcccaggtgctgcacgaaccactgcgccacgccgcccttggccaacagcaaggtccaggcataagccttgacgatataactggcccacatcggcatcatcaccgcgatgtagaagaacgccttggtcttgcccgtggtgtagcgtgccatgtagtaggcgatggggaaggccacgatggcgctggcgatcgacaccacgatcgccatgctcaaggtgcgcacgatgatgtcgaagtttgacggctggaacagcgcggcgaagttggccagggtcaggtccggcgtgaccgccatggtgaagtcatcgaaggtgtagaaaccctgccacagcagggtcagcaacgaacccaggtagatcgcgccgaaccagatcagcggcggtatcagcagcatggccaagtacaggttgggcttgcggtacagcaggttggaaaacctgcgcatcggcgggtgggaaatagccaggctcatgtcacacctcgcctgcgctgtcggtcagcggggtcatggcttcgcgcgcccaacgggcggtgatggactggccgacctgatggccgctgctgatgtccagccactggttgttggcctggctgatgttcaacgcctggccgttttccagtttcagctcatagcgggtggcgctgccctggtactggatatcgtggagcaaaccgctgatttccacttcgccggcgcccagcgggccctcggcaaaccgcacgtgttccggacggatcgaaaacggctgcacgctgccgctgaggcgctgggccaactcgccgcgaatcacgttggaggtgccgacgaactcggcgacgaacgcggtggcgggtttcatgtagaggttgcgcggggtgtcgacctgctcgatgcgacctttgttgaatacggccacgcggtcggacatcgacagcgcttcggtctggtcgtgggtcacgaagataaaggtgatgcccaactggcgttgcagctttttcagctcgctttgcatctgctcgcgcagcttgaggtcgagggcgcccagcggttcatccagcagcaacacacgcgggcggttgaccaaggcgcgggccagggccacccgttggcgttggccaccggagagctgcaccggcttgcgctcgccgtagccgccgagggcgaccatggccagggcttcttcggcacggttgaggcgctcggtcttgcccacgcccttgaccttgaggccgtaggcgacgttgtcgcgcacattcatatgggggaacagcgcgtaatcctggaacacggtgttcacatcgcgctggtacggcggcaagccggcggcttcctcgccatggatacggatcgagcctgcgctcggctgctcgaacccggcgatcaggcgcaggcaggtggtcttgcccgagccggaagggccgagcatggaaaagaactcgccgtcctggatatcgatggaaacccggtcaacggctttcacttcgccgaactgacgggaaacgtgggtgaattggactgcaagcgtcatggtgcggtgctccgaaaaggcacgggtcgtcgcagcggcccggcctggacttctgaaaaaacaaaacatctgtgaatgcggtcaatgtgggagggggcttgcccccgatgactgtgcaccagtcgacacaagtgtgtctgatgtaccgctatcgggggcaagccccctcccacaggagacctatgttgtcttggagaccttagcggccgcccatgatcgcaatgtaatcctgggtccagcggctgtacggcacgaacttgccgccctccgcctgcggggttttccagaaggcgatcttgtcgaactgatcgaacccgttggtcttgcagccttcggcgccgagcagttcgcttgcctggcacgccgcaggcacggctggcagcgaaccgaaccaggcggccacgtcaccctggaccttcggttgcagcgaccagtccatccatttgtaggcacagttcgggtgcttggcctcggcgtgcaacatggtggtgtcggcccagccggtggcgccttccttcggaatggtcgaagcaatcggctgtttctcgttctgcaggccgttgacctgatacggccaggcgctggaggccaccacgccttcgttcttgaagtcactcatttgcacggtggtgtcgtgccagtagcggtggatcagcggttgctgggcgcgcagtaattcgagcacggccttgtactgggtttcggtcagttcgtacgggttctggatggccaattccggcttggtcgacttgaggtacagcgccgcgtcggcgatgtagatcgggccgtcgtacgcctgcacgcggcctttgttcggcttaccgtccggcaggttctgcgcgtcgaacagcacattccagctggtgggtgcggtcttgaatacgttggtgttgtacatcaatacgttcgggccccactggtacggcgtgccgtaggtttgctggccaaccacgtaccatggcgcgtctttcaggcgggggtcgatgttcttccagttggggatcagcgcggtattgatcggctgcacgcgcttgccgacgatcagccgcagcgaggcatcgcccgacgcggtcaccaggtcatagccacccttggccatcaggctgaccatttcgtcagaggtggcggcggttttcacgttgaccttgcagccggtttccttctcgaaaccgctgacccagtcgtaggccttgtcgctttcgccgcgttcgatatagccaggccaggcgacgatatccagttggccttcaccggcacccaccgccttgagcggttcggcggcctggaggctggcgctggccagcagcgcggtggtcagggcactgagcagtgcggtcttgtgcgcggacatgggggttccctcttctttaattatggtcggggcagtttttgaaccggtaacgcatgagcttagttgttgttttaaagatgctggccgtggcgcgccatgatgtgccgcaccacgctgtagtcctgcagcgaatcgctggacagatccttgccatatcccgagcgcttcaagccgccgtggggcatttcgctgaccagcatgaaatgactgttgatccaggtgcagccgtattgcaggcgcgaggccacttgcatggccttgtccaggttctgggtccacaccgacgaggccaggccgtattcggagtcgttggcccagtccaccgcctgttccagttcgtcgaagcgcgtcaccgtgacgaccgggccaaacacttcgcgctgcacgatttcatcgttctgtttgcagccggccagcagcgtcggctggtaatagaagcccgcgccggaatgcacggcggcgccggtgatgcgttcgatatgcggctggccgagggcgcgctcgacaaagctggccacgcggtcgcgctggcgtgtgctgatcagcgggccgagttcgttgtcggcgtcgcgcttgctggcaaagcgcaggctgctcacggcggcgccaagctcagcgaccagtttgtcgtggataccggcctgggcgtagatgcggcacgcggcggtgcagtcctggccggcgttgtagtaaccgtaggcgcgcacaccctcgaccacggcttgcaggtcggcgtcgttgcacacgatcaccggcgccttgccgcccagttccaagtgcgtgcgtttcaaggtcttggaggcggcctgcagaatcttctgcccggtgacgatatcgccggtcagcgagaccatgcgcactttggggtggctgaccagatggctgccaacgccttcaccgccgccacacagaatgttgatcacaccgcgtggcaacaactcgttgagcgccggggcgagggcgaggatcgacagcggcgtgtgttccgacggcttgaacaccaacgtattgccggcggcgagggctggggcgattttccacgcggccatcatcagcgggtagttccacggcgcaatcgaggccaccacgccaatcggatcgcggcgcaccatgctggtgtagcccggcaggtattcaccgctgagttgcccggtctggcaacgcacggcgccagcgaaaaagcggaacacatcgacggtggcgctcaaatcatcctgacgcgccaggtgcaacggtttgccgcagttcagcgattccaggcgggccaggtaatcggcttgtctttcgatggcgtcggcaatgcccagcaggatgttcgagcgttgctgcggcgtggtgcgcgaccagccggcaaaggcgcggtgagcggcgaggatcgcggtttccacctgctcggtgctggcttcggcgatctgggtgagcacttcacccgtggccgggttgaggatcggctcggcaaaaccctggccctggaccagttcgccgtcgatcagcaacgcagtaagcagcggggtgggcgcgccggacatttttcgcgatctcttttcttgtgtggccatgggcgttctcttacgagggcctgacctttctcttagggataagcagagactagaggtcaggcgcgaggtcaacaaatactaaatactgaatgcagcattcgattaaatagatggcttgcgcgggtgcggctgttcgcgggcgactgtcaggaatgggtccaccagcgccggacgcgccgtgccacggcgccaggccaggcccacgtcgagggtctggctgaggtcggcaatcggccgcgcttcgataatgtcgccctccagcgaccagggacggtaggtcatgtcgggttggatcgacacgcccaggcctgctgccaccaggctgcgcaccgcttcggtggaggcggtgcgcagggtcacgcgcggttgcaggccggcgctggtccacaggcgctgggcgttgtggcccatttcatcgacgttcagctggatcaacggttcgcgcgctacatcggccaggttgatgctgtcgtgctccagcagcggatgctgtgctggcagccaaagccggtgaggggagtgggtgagcacttcggtctgcagggcgtggcggtcttcgaggttggagaggatcagtacgcccacgtcgatttcaccgctgaccagcaaatgctcgatgtacggccgttcgtcctccatcacgcggatttccacgttggggtaggcgcgctggaagcgggtcagcaagtcggcgaggtagtaacccgccaccaggctggtcacaccgatgatcaactgcccggcgacctggtcggtgctctgctgcaggctgcgcttggcgttgtcgacggtggcgagaatcaagtgcgcctggcgcaggaactgatggccctggtgggtcagggtcatgcccttggcgtgacggttgaacaggttgacgccgatttcctgctccagttgctggatcgccagggtcagagtcgactgggagataaacgccgtctgcgcggcagcggagatcgagccggtctcggccacggcaataaaatgccggatttgacgcaaggtcatcatgctggaattaccagtggggtgtttttatagatttatccgagtgtatatcgatttaagcgaagggcgaccgcgttacatctggaagcactctagatcagggctttttggcacttagttttacgctgggggcctattggtcctatgaacccaagtgtctggaggctgcgaatgaatacccgtggattgctcgatcagttgctcaagtctggccaggacatgctgcaaaacaaggctggcggccagcgtaaacaggacgacaaaggtgcgctgggcggtctgctcggcggtggcggcctgggcagcctgctcgggggcgccggaggcggcgccttggcggcgggggccatgggcctgctgctgggcaacaagaaggcgcgcaaattcggcggcaaggcgctgacctacggcggtttggcagccttgggcgtcatcgcctacaaggcctacggcaactggcaggccaatcaggccagcgccccccagggcgagccacagaccatcgaccgcctaccgccggcccaggtcgagcaacacagccagggcatcctcaaggcgctggtcgcggcggccaaggccgatggccatgtggacgagcgcgagcgtgcgctgatcgaaggcgaattcaccaagctggacaacgatcgcgagctgcaaagctggctgcgcgccgaactcaacaaacccctggacccggccgacgtggcgcgagctgccggcaccccggaaatggcggccgagatgtatatcgccagcgtgatgctggtggatgaggagaacttcatggaaaaggcctaccttgacgagctggcccgccaactgaagcttgagcccggcttgaagctggaactggaaaaacaggtgcggctgaacgcgtaaagacggggcgtgcagcgatcaaaatgtgcgagggggcttgccccccgatagtggtgtttcagtctatttacagttggctggcacaccgccatcggggggcaagccccctcgcacatttgcattctgtggacgcttcatcaaaacccgttgattaatgaggccttctgctcagctatactcccctccatttgaatggccctccgaggaattactgtgaagaactggaccttgcgccaacgcatcctggcaagttttgcggtcattatcgccatcatgctgttaatggttgtggtctcctattcacggttgctgaagatcgaaaccagtgaagtcgcggtgcgcgacgacgcggtgcccggggtctacctcagttccatgatccgcagcgcgtgggtcgacagctacctgcaaaccctggagttgatcggcctgcgtgaagacaagggcctgaccgataccgacaaggccgacttcaagtcctatgaagcgcgcatcctgcagcagatggccaactaccaggcgaccatcagtggcggcgacgaccaggccgagttcgataaattcgaagcccagcaccaggcttacaacaaggcgctggctgccgtcgtagagcgcctgcagaacaacgatttggctggggcgcgcaagctgttcgatacgcagatgacgcccagctgggtcgcaggccgcatgaagctcaacgacatcatcaccgagaacaagaacgtcgccgaccgtgcgaccaacgcgatcgatgatgcagtatccgccgcgaaaatcagcatgtttgtgtcgctggccctggccatcctcgccgccggcctgtgcggcctgctgctgatgcgcgcgatcatggcgccgatgcagcgcatcgtcgatatcctcgaaaccatgcgcgacggcgacctgagcaaacgcttgaacctggagcgcaaggacgagttcggcgcggtcgaaaccggcttcaacgacatgatgaccgagctcacggccctggtgtcccaggcccagcgctcgtcggtgcaggtgaccacctcggtgaccgagattgccgccacctccaagcagcaacaggccaccgccaccgaaacggccgccaccaccaccgagatcggcgccacctcccgcgagatcgcggccacctccaaggacctggtgcgcaccatgaccgaagtgtccaccgccgccgaccaggcctcggttgccgccggttccggccagcaaggcctggcacgcatggaagaaaccatgcactcggtgatgggcgccgccgacctggtcaacgccaagctggcgatcctcaatgagaaggccggcaacatcaaccaggtggtggtgaccatcgtcaaggtcgccgaccagaccaacctgttgtcgctgaatgccgccatcgaagccgagaaggccggtgaatacggccgcggttttgccgtggtcgccaccgaagtacgccgcctcgccgaccagactgccgtggccacctacgacatcgaacagatggtgcgcgagattcagtcggcagtgtcggcgggtgtgatgggcatggacaagttctccgaagaagtgcgccgtggcatgtttgaagtgcagcaagtgggcgagcaactgtcgcagatcatccaccaggtacaggcgctggcgccgcgggtgttgatggtcaatgaaggcatgcaggcccaggccaccggtgccgagcagatcaaccacgccctggtgcaactgggcgatgccagcagccagaccgtcgagtccttgcgccaggccagctttgctatcgatgagctgagccaggtggcggtcggtctgcgcagcggcgtgtcgcgtttcaaagtctgatgagcgacctcgcggctaaacgcggcgccgtcccggcagcgaaaaaggcgttgttcctggtgttccacatcggcaatgaacgttatgccctcaaggccacggaagtggccgaagtattgccgtgcctgccattgaaaccgattgcccatgcaccgctgtgggtggcgggcatctttgcccatcgcggcgcgctggtgccggtgatcgacctcagcgccctgaccttcggcaccgccgcccaggcacgtaccagcacacggctggtgctggtcaattaccagcccgagccctggcgcgagccgcgttggctggggttgatcctcgaacaggccaccgacaccctgcgctgcgacccggcgcagttccagccctatggcctggacaaccgccaggcgccgtacctggggccggtgcgcgaagatgcgctgggcctgatgcaatggatcggcgtgaatgacctgctgaccgaagacgtgcgcgccgtgctgttttgccccgagttgagcctatgagccacgacccgcgtttctttgccttcctgaaagagcgcatcggcctggacgttgcctcggtcggcgaagccattatcgagcgggcggtgcgccaacgcactcaggcggccaacgcgcagacccccggcgaatattggcagcacctgcaaagctccgaggatgaacagcaagcgctgatcgaagcagtgatcgtcccggaaacctggtttttccgttatccagaatcctttgtgaccctggcccgcctggccaaggcgcgcttggccgagatcaagcagatgcgcgcactgcgcatcctcagcctgccgtgctccaccggtgaagaaccttattcgatcgccatggctttgctggatgccgggttggcgccgcatcagttcaaggtgcagggcctggatgtcagcccgttgtcggtggagcgcgcgcggcgtggggtgtatggcaaaaactcctttcgcggcggcgatatcgccttccgtgaccgccatttcaccgaacacagcgacggttatcacattgccgagcgcgtgcgcgaacaggtgcgcctgcaagtcggcaacctgctcgacccgacactgctggccaatgaggcgagctacgatttcgtgttctgccgcaacttgctgatctatttcgaccagccgacccagaaacaagtgttcgacgtgctcaagggcctgacccatgtggacggcgtgctgtttatcggtccggccgagggcagcctgttggggcgccatggcatgcgttcgattggtgtgccgcagtcgtttgcgttcagtcggcatgccgagccggtcaagcccgaaccggtgtttgtgcccgtgcctgcaccggtgccacagcgcagtgccgcaccgatcccggtcaagccgaggccgttcagcggtggcagtgcccaggtagtgccgatcaaggcaccgcacaccgatgcgggcgacttgctgagccgcatcgccaccctggccaacgaaggcaaaagcgctgacgcccgtgctgcatgcgaacagtatttgagtaaccatccgccggccgcccaggtgttctactggctggggttgctcagcgacgtggccggcagtgccctggaagcccagggttattatcgaaaagccttgtacctggaaccccagcacccgcaggctttgatgcacctggccgcgttgctcgaatcccagggcgacagtgcgggggcgcgccgcttgcaggcgcgggccgcgcgcagtgagcgagctgacagtgagtccaaacgatgagtaacaccgacgcgctcgataccgcagggctggacctgaccttggccgacacccaggccatcgacgattgctggaaccgcatcggcatccacggcgacaagtcctgcccgctgctggcggaccatattcactgccgtaactgctcggtgtactcggcagcggccacacgtttgctggaccgctacgccttgcagcaggacgcgcatcgcccgcatgccgtcgtggaactgggcgaagacgtggtcacccgctccctgctgatgttccgcctcggtgaggaatggctgggcatcgccacccgctgcctggtggaagtcgcgccgctgcaaccgattcactcgctgccgcaccaacgttcccgcgccttgctcggcgtggccaatgtccgtggtgcgctggtggcgtgcctgtcgctggtggaactgctgggcctggatgccaccagtaacggcgccagcggtgggcgcatcatgccgcgcatgttgatcatcgccgcgcaggatggcccggtggtggtgccggtggatgaagtcgacggcatccatgccatcgatgagcgcaccttgaaggccgcctcggtctcgggcacccaggccagtgcgcgctacacccaaggcgtgttgcagtggaaaggccgcagcttgcgttggctggacgaggcgcaattgttgtctgccgtgacccggagcctcacatgacccccgaccagatgcgcgatgcctcgctgctggaactgttcagcctggaagccgacgcccagacccaggtattgagcgcgggcctgctggccctggaacgcaacccgacccaggccgaccagctcgaagcgtgcatgcgcgcggcgcactcgctcaaaggcgcggcgcgcattgttggagtggacgccggggtcagtgtgtcccacgtcatggaggattgcctggtcagtgcccaggaaagccgcctgtatttgcaacccgaacatattgatgcgctgttgcaaggcaccgacctgctgatgcgcatcgccacgccgggcaatgatgtggggccggcggatatcgaagcctatgtggcgttgatggagcgtttgctcgacccgtcccaggcgcctgtcaaagcggcgcctgcgccagaaccggcacctatcgtcgaagcgccgctgccggagcccgaacccgagcttgcgctgccgatggtcgccgagccgccacgccagaacaaacgcatgaccgaaggcggcgagcgcgtactgcgggtgaccgccgagcgcttgaacagcctgctggacctgtcgagcaaatccctggtggaaacccagcggctcaaaccgtatctggccagcctgcaacgcctcaagcgcattcagagccagagcgtgcgcgcgctggataccctggacgggcaactcaagactcaacatctgcccctcgaagcccaggaagccctggccgacacccgccgcctgctcagcgaagcccaggccctgctggcggaaaaaaccgccgagctggacgagttcggctggcaggccggccagcgtgcgcaagtgctgtatgacaccgcgctggcctgtcgcatgcgcccatttgccgatgtgctggccgggcaagtgcgcatggtgcgcgacctcggtcgcagcctcggtaagcaagtgcgcctggagatcgaaggcgaaaagacccaggtcgaccgcgacgtgctggaaaagcttgaagcaccgctcactcatttattgcgcaacgctgtcgaccacggcatcgaaatgcctgagcaacgcctgttggcgggcaagccggcagaaggcgtgatctgcctgcgtgcctcccatcaagccgggttgctggtgctggaattgagcgatgacggcaatggcgtcgacctggagcgcctgcgcggtaccatcgtcgaccggcacctgtcgccgctggaaaccgccctgcgcctgagtgaagaagagctgctgacattcctgttcctgccggggttcagcctgcgcgacaaggtcaccgaagtgtccgggcgcggcgtcggcctggatgcggtgcagcatatggttcgccaactgcgcggtgcggtggtgctggagcagacggcggggcagggcagccgtttccacctggaagtgccgctgaccctgtcggtggtgcgcagcctggtggtggaagtcggcgaagaagcctacgcgttcccgctggcccatatcgaacgcatgtgcgacctggcgcccgacgacatcgtgcaactggagggtcgccagcatttctggcacgagggccggcatgtcgggctggtcgccgccagccagttgttgcaacgcccggcgggacagagtcagtcggacaccctgaaagtggtggtgatccgcgagcgtgatgcggtgtacgggattgccgtggagcgctttatcggcgagcgtacgctggtggtgctgccgctggatgatcgcctgggcaaggtccaggatatttctgccggtgccttgctggacgacggctcggtggtgttgatcgtcgacgtcgaagatatgctgcgttcggtggacaagttgctcaacaccggccgattggaacgcattgcccggcgcagccagcaaaccaccgaggcaccgcgcaagcgggtgctggtggtggatgactcgctgaccgtgcgcgaactgcaacgcaaattgctgctgaatcgtggttatgaagtggccgtggcggtcgatggcatggacggctggaacgccttgcgctccgaagactttgacctgttgatcactgatattgatatgcctcgtatggacggtattgaattggtcacactcttgcgccgtgacagtcgcctgcaatcgttgccggtgatggtggtgtcgtacaaggatcgcgaagaagaccgacgtcgtggactggacgccggcgccgactattatttagccaaagccagtttccacgatgacgccctgctggacgccgtagtggaactgatcggaggcgcgcgggcatgaggattgcgatcgtcaatgacatgcccctggcggtagaggccttgcgccgcgccttgagtttcgagcccgcgcacgaagtggtgtgggtggccagcaatggtcttgaagcggtgcaacgctgtgcagaactgaccccggacctgatcctgatggacctgatcatgccggtgatggatggcgtggaggctacccgccagatcatggccgagaccccgtgcgccatcgtcatcgtgaccgtcgaccgccaggccaacgtcagtcgggtgttcgaagccatgggtcatggcgccctggacgtggtggacacgccgaccctaggcgtgggcaaccccaaggatgcagcggcgccgctgctgcgcaagatcctcaatatcggctggctgatcggccagcgtggcagccgtgtacgcgccgaaaccgtcgcgccgcgcatgaccggcaagcgccagagcctggtggccatcgggtcttcggcgggtggcccggctgccctggaaatcctgctcaagggcttgccccgggactttcccgccgccatcgtgctggtgcagcatgtggaccaggtgttcgccgctggcatggccgaatggctgagcagtgcctccggcctgccggtacgcctggcccgtgaaggcgagccgccgcaaagcggcgtggtcctgctggccggcaccaaccaccacattcgtttactgaagaatggcacgctagcctataccgcagagccggtgaacgagatttaccggccgtcgatcgacgtgtttttcgaaagcgtggccagccactggaatggcgatgccgttggcgtactgctgactggcatggggcgcgacggggcccagggcctcaaattgctgcgtgaacaaggttatttgaccatcgcccaggatcagcacagctcggcggtgtacggcatgcccaaagcggcggcgattgatgctgctgttgaaattcgcccactggacaggattgcgccccgattgctggaggtctttgccagatgaacaaggcctctcgcggtgctggcttgcaggtagtaattcaggtgactgcacatgaatgatttacagatcgacgacatcaagaccgacgaaaatgccgccatggtgttgctggtcgacgaccaggccatgatcggcgaagccgtgcggcgtggcttggcccatgaagaaaacatcgacttccacttctgcgccgatccgcaccaggcgattgcccaggcgatccgcatcaagccgaccgttatcctgcaagacctggttatgcccggcctcgacggcctgaccctggtgcgcgaataccgcaaccacccggccacgcagaacatcccgatcatcgtgctttcgaccaaggaagatccgctgatcaagagtgcggcgttttcggcgggggccaatgattacctggtcaagctgccggataacatcgagctggtggcgcgcattcgctatcactcgcgttcgtacatgaccttgttgcaacgggatgccgcctatcgtgcgttgcgggtcagccaacaacaactgttggacaccaacctggtgctgcaacggctgatgaactccgatggcctgaccgggttgtccaaccgtcgtcactttgatgaatacctggagctggaatggcggcgtgccatgcgtgaccagactcagttgtcgttgttgatgattgatgtggatttcttcaagacctacaacgatagttttgggcatgttgaaggtgacgaggcgttgcgcaaggttgcggcgaccatccgtgaggccagcagtcggccatcggatttgccggcgcgctatggcggtgaggagtttgccctggtgctgcctaatacctcgccgggtggggcgcggttggtggctgagaagctgcgcatggcggttgctgcgttgaagattccgcacattgcgccgaccgagggggccagccttacgattagcattggtctgtccacgatgacgccgcagcaggggacggattgtcggcaggtgattgtggcggcggacaaggggttgtatacggccaagcataatgggcgcaatcaggtcggtatcgagtgacctgaagtcttaccccattcaatgtgggaggggggcttgcccccgatagctgtgggtcagtcacaacatcattgactgacaggccgccatcgggggcaagccccctcccacattgggatcttgatgggtcttgggttgtgtacaaatcctgccttttcgcccagcggactgccgctcccccccatttgccgttatactcgccggctttcaaaagttcgccaacgagtgctgcccgccatggaaatcaacccgatccttaacaccatcaaggacctgtccgagcgctccgaaactattcgggggtatctttgactacgatcaaaagcatgagcgtctgaccgaagtcaatcgcgagcttgaagatcctgctgtctggaacaaacctgaatacgcccaggaactgggccgcgagcgcgctgcgctggcgcagatcgtcgataccttagacgagctgaacaccggtctggccgattgccgtgacctgctggacatggccgtcgaagaaaacgacgaaggcgcagtgggcgatgtcgtcgccgagctggcccgtctcgaggaaaacctcgccaagctcgaattccgccgcatgttcagccatgaaatggacccgaacaacgcctacctggacatccaggccggttccggtggcaccgaggcacaggactgggccaacatcctgctgcgcatgtacctgcgttgggcggacaagcgcggtttcgaagcgacgatcatggaactgtccgccggtgaagtcgccgggatcaagggcgcgaccgtgcacatcaagggtgagtacgcctttggctggctgcgtaccgaaatcggcgtgcaccgcctggtgcgcaagagcccgttcgactccggcaaccgtcgccacacctcgttctccgctgttttcgtctcgccagagatcgacgacaaggtggaaatcgagatcaacccggccgacctgcgcatcgacacctaccgctcctccggtgccggtggccagcacgtaaacaccaccgactcggccgtacgtattacccacgtaccgaccaacaccgtggtcagctgccagaacgaacgttcccagcacgccaacaaggacaccgccatgaaaatgctgcgggccaagttgtatgagcaggaaatgcagaagcgcaacgccgcttcccaggcgctggaagacaccaagtcggatatcggctggggtcaccagatccgctcttatgtgctcgatgcgtcgcggatcaaggatctgcgcactaacatcgaacgcagcgactgtgacaaggtgctcgacggcgatatcgacgaatacctggaagccagcctgaaatcgggcctctaaagaaccttgtaggagcgggcttgcccgcgatccccagccgaaggctggggaaaacgtatctgtgatggaatttcaaaagacatgagcgaccaacaactcgacccgcaagccctgcaacaggaagaaaactccctgatcgccctgcgcaaggaaaagcttgctgccgagcgcgccaagggcaatgccttccccaacgacttccgccgcgaaaactactgcgatgccttgcagaagcagtacgcggacaagaccaaggaagagctggcagaggctgcgatcccggtcaaggtggcaggtcgcatcatgctcaaccgtggctcgttcatggtgatccaggacatgaccgggcgtatccaggtctacgtcaaccgcaagaccttgtcggaagaaaccctggcctcggtgaaaacctgggacatgggcgacatcatcgccgccgaaggcaccctggcccgttcaggcaagggcgacctgtacgtggaaatgaccagcgtacgcctgctgaccaagtcgctgcgcccactgccggacaagcaccacggcctgaccgacaccgaacagcgctaccgccagcgctacgttgacctgatcgtcaacgaagaggtgcgccagaccttccgcgtgcgttcgcaagtgatcgcacacatccgcagcttcctgatgaagcgcgacttcctcgaagtcgaaacgccgatgctgcagaccattcctggcggtgccgctgccaagccgttcgaaacccaccacaacgccctggacatggaaatgttcctgcgtatcgcgcccgagctgtacctcaagcgcctggtggttggcggcttcgaaaaagtcttcgagatcaaccgcaacttccgtaacgaaggcgtttcgacccgtcacaaccctgaattcaccatgttggagttctaccaggcctacgccgactacgaagacaacatggacctgaccgaagaactgttccgcgaactggcgcagctggtcctgggcagcaccgacgtgccgtacggcgacaaggtgttccacttcggcgagccgttcgtgcgcctgtcggtgttcgattcgatcctcaagtacaaccctgagctgactgccgacgacctgaacgacatcgacaaggcccgtgccatcgccaagaaagccggcgccaaggtgctgggcttcgaaggcctgggcaaattgcaggtgatgattttcgaagagttggtggagcacaagctggaacagccgcacttcattacccagtacccgttcgaagtgtcgccgctggcccgtcgcaacgacgacaacccgaacgtcactgaccgtttcgagctgttcatcggcggccgtgaaatcgccaacgcctactccgagttgaacgacgcggaagaccaggccgagcgcttcatggcccaggtggccgacaaggacgctggcgacgacgaggccatgcactacgacgccgacttcgtccgcgccctggagtacggcatgccgccgaccgccggtgaagggatcggcatcgaccgcttggtgatgctgttgaccaactcgccatcgatccgcgacgtgatcttgttcccgcacatgcggccacaagcgtaaccgtagcgaaatccgaagccgccttttataaggcggcttttttatgtggcgttaataagcgtcaagcaaacagcgccaggagatcgttcccacgctcggcgtggtaacgcataccgtgacgctctgcgtcacctaataaggaaatctgtcgtgaaccgcgtaaccgctcaagaaggcgccgccggcattgccgctgccgtggctgaaagcgtccagtaccagggccgcaaggccagtcgtcggggcagcgagcaacgcaggcaggacattctcgatgcggccatgcgcatcgtcgtgcgtgacggcgtgcgcgccgtgcgccatcgagcggtggcagcggaggcgggcgtgcccctgtcggctaccacctattacttcaaggacatcgatgatctgctcaccgataccttcgcccaatacgtcgaacgcagcgccgcgttcatgggcaagctgtgggtgcgtaacgaaggcttgctgcgcgaaatggtcgcctatggggatggcagccccgaatcacgctcacagttggccgatgatattgcacggctgaccgctgattacgtcttgcgccaattgaccaaccgccgtgagcacttgatggctgagcaggcgtttcgccaggaagccttgctcaacccgcgcctggcggagttggtgcgttcccatcaacagattctgttgcagggcaccgggcagttcttccaggtgctgggctcgcgcgagccgcaacaggatgccaaagtgttgacggcgataatcagtcggatggaatatcagggcctgctgggcagtgcagagcctctgaccggtgaagagatgcttgaaatcctcaagcgctatatgcatttggtgttggcctcggtctgacaccgggggatgcccaatgaaagcctggcgtgtggttgcaatcgccttgtcgttcctgctgctcagcggttgcctggtgaccttcaaggacccgctgccggcccatgacgccgcgccgccagccctgctgggccagtgggcgagcaaaaacgcctggggcgagccgctcaacctgcatatcagcgccgtcggtgaacaccgctataaagccgtgagctaccctacagccaagcccggccagcgtgacgaataccggtttaccgtttcgcgccatggcagccgctggtatttgtcggcgccgctgccggccaagctcggtgggcatttcatcctggcggggtttgagatcaacgaaaagcacgaattggtggtctacaccctcgaccttgagcagatccaccaagcgatagaccaacaggcgttgcacggcagcaccgtggacacggtcgagggcgccggggtgctggtcgacagccccttggaccaagtgtttgcgtacctggatgacccggccaatgccgatgtattcgtggaagccgtgcgctaccagcgcgcgggccaataacgtttaaagaggaagcaccgggtggacgattaccagcagacgatacgcaccttgtctgatcgcattgtgctggcgcaaacaccgattcgcgtcctcgacgccgtgaagtgggacgagaatattcgccaggggttcctcaaggccaagggcaaggaaatgccggcggtgagccgtgactattacctcaatcgaccgctgtcgttcgactccagcgcggtgaagctggagttccagaacatcgagcgcgacatcacccgtcgcctcggccagttcagcccggtggggcagatcatgcgccgcatgtgcaaggagtaccgcatggtggtgcgcatgctcgaagcgcgtggtaccgaggatttcggcctgatctcccaagaattgtacggcgctgcctccgatgcgtttcacgccggcgatccgaccctggctgacctggggctgatgctgtccgattatctgaacaatatagacggccgaggcgacttgaaggacgaggccaagaccctcaccgccaaggatgccgtcgccctgctgcaaacccgcctgaacaaggtatttggcgaggccgaagagaccatccgcgtgttcgagtccgacggtattgtcgctgacgccgcagcgggcgccgactacatcaagatccgcgccgacgcgatgttcaacgaccgcgacgtgcgcgccctggaagtgcatgaaggcctggtgcatgtgggcactaccctcaatggccagaaccagccgatctgcaccttcctgtccaaggggccgccctcgtccaccgtgacccaggaaggcctggcgattttgatggagatcatcaccttcgcctcctacccgagtcgcctgcgcaagctgaccaaccgcacccgtgccattcatatggtggaagagggcgccgacttcctgcaggtgttcgagttctttcgcgagcaaggcttcgagatggctgaaagctacggcaacgccagtcgtgttttccgtggttcggtgccgaccggtctgccgttcaccaaggacctgtcctacctcaaaggctttatcatggtctacaactacatccagctggccgtgcgcaaaggcaagctggaacaagtgccgctgctgttctgcggcaagaccaccctggaagacatgcgcaccctgcgccaactggtcgatgaaggcctggtggtgccgcccaagtacctgccagagcaattccgcgacatgaacgcgctggcggcctggatgtgcttctccaacttcctcaaccacctgagcctggatcggatcgaggcggattactccaatatcctttaaaccgtgctattcgcgaggcttcaacggatgagaatcctcggcattctgtgcctgctactcacattgaacggctgcagttccctgctgttctaccccgagcccggcctgccgttcacgccggaaaaagctcatcttcaataccgtgacgtcaccctcaccactgccgacggtgtaaagctcaacgcctggtggctaccggccaaacccggcgtgccactcaaggggacggtgctgcacctgcatggcaacggcggcaacctggcctggcatctgggcggcagctggtggttgcccgagcagggctaccaagtgctgttggtggactatcgcggttatggcttgtcggaggggaagccgtcattaccggcgatctatcaggatgtggacgcggcgttccaatggatcgacaaggcgcccgaaacccagggccagccgttgatagtgctgggtcagagcctgggcggcgcattggcggtgcactacctggccgcccacccggagcgccaatcgcggctcaaggcgctggtgctggacggcgtgcccgccagttatcgtgacgtaggacaattcgccctgagcacctcctggttaacatggccgtttcaggtgccgttgtcctggctggtcccggacgccgacagtgccatccatgccatgccccagctgacaggtgtacccaagctgctgttccacagcctggatgacccgatcgtgccggtgaccaacgggatccgcctgtaccaggccgcaccgccacccagggtgttacagctgacccgaggcggccatgtgcagacctttgccgacaagacctggcaaaccgtgatgctgcgttacctggatgaccctcagcacttcaatggactgcgccgcctgggcgaaatcccgaattacccgattcctaacgttgactcatcagagagcccgcaatgagcgaagaacgcaacatgatcccgctgatcctcaccggtatcggcaccatcatcggtactgtcggttgcctgtggtactacggctacctgcacttcgccaagccggaagatgcgttgttgctcagcgacttcaccatgctcaagaccgtgcccggcgaggactacaagatctccctgacgccagccgcccaagtggcgcaatgcgtggatggtgtactggtgatgttcgacactgagcagaaaggcctgagcggtgtgctggtgaataacaagaagcaggccgtgcgatgcatggggcaggaaacaccacaactccagcagtaagccggatgtaccgcgcctgaaatatctggaaccgttttgcgtaacagaccactcattggcgtgtcagcgttcatggtgagatttgcgaaccgccagccaggggagtgtcatggtcaagttgggtgagataagtgcgatagacaggtggttggagatgtccaggatgcaggagctcgttgaagcgctccgtggaggcgtcgacgataccgcgcaaaaggagcagggggagcagtgccaagagaaaccaggctatgcaggtttcgagagcgacaagtgtccaatcaaattctaagtgtaaaaaaacccaccgtttctggtgggttttttctatccaaacaatcagttagcgacggacgaccgtggcttgaccggctggttgtcattggagatggttacttcgacgcgacggttcatggcacgaccagatacgctaccgttatcggcaaccgggtattccttgccatagccctgggtcacgatgcgcgagatatccacgccctgttgtgccagtgcacgttgtacggaggctgcacgacgctcggacaggctctggttgtacgaatcggaaccggtgctgtcggtgtagccttcgacgatcaccttacggtccgggttatcgcgcaggaactgcgccagcttggtgatgttcaccaggccgctggatttcaggtcggacttgttggtggcaaacagcacgtcaccgaaggtcaccagggtgccgcgatcagtctgcttggcgttcaagctgtcctgcagttgcttgatctgcgcatcacgggcgtcgagcagggcgcgggcgcgttcgtcaccggcgtttttcagcttggcttcggattcgcgcagcacgatggtgtctttggctacttcaacgcgctggttggtcaggtaggccagttggtcgaccttcttctgatcttccttgtcgcggtatgccttgtcagccttgtccagccaatcgctggcgtctttggtttccagcgccgcgagcttggtggcctgcgggttggtctgcagggacgagaagttggtccgtgcgttttccaggttcgcgttaggcggggtggagcaggccgccagggcaacgctcatcgccagcagggcagggatcatcaattgtttacgcatagtcgtgtcgtcctttcaattcgatatcgggtgcaatgcaatcaggggcggcttatttctgctggatagcagccgggcgcatgccttcctgacgcagctcctgaacagctttctgggagtccttcacagcctgttcggccttagcggcctgggatttacgctcagcgacacgagcgtcccactcggcttgttcggccaggcgacgggcttcgtcgtagttcttgtcgtgcatggcaatctcggcttgcttgagcttgtcctgagccgacttcatttctaccgctgcgtactcggtgccgccggcgctgacagcgctgttcaccgcagattgggtcacggcgtactgctcggtcggagggttgccggcgcagcccgccagaacgaagctggtgccgattgccagcgcggccaatttgagcccgcgcaggtggttaaacgaggatttggcagtgctggtcttcatcgtcttcaactccattggataactcctgaaaaacatcaaaatccatgtcactggtctgcggctgggggcttggtactcacgcacaaattgccctttaaaacggccgttccaagtgatggcttactggctgtgaccggaggcttttttcaaaagttcagagaagatggcgatttgcctaaaaaaatatctgactgtttggtcagcgaaaaaacttggaacttctgcgttgcgcagcggtacgccgggctcctaaagagcccggaatacagggggtttgcgctagggtttcagtgtttcggtttgtcgccactcgctgataagtcatgcagatagcgacgcgacagcgtcagaaagcgcggagtagggccgacatcttcatagagcgggtcgccctcttcatcggtggcgatcacctgctgccccttgatgtatggaaagctggcttccagctcttccagtgcggcgccgatcagttcgccgagcagttcttcggtgctgcgcttggggtacatctcggcgatcgctgccaggcgtgccgcagcttccacatccagatggatggcgtactcggtcttggtcaggcgacccttggcattctcttcccagtgctgggccagttctcggattttcatggcaacctcaataaagctcgcgatagcaggcggtgatgagtgacccgccgtccgcgtggataaacgcggcgacttagtgttgagactagctgcaactcacaaggtttaaagtcttgtcataaatgagcgctggcggcactctggcaaacctgcgcgtcccggatttctggctggagattggctgatgagtgatatcgatgcacgcttgcgtgaggatgttcacctgctgggtgaactgttgggcaacaccattcgagagcagtatggcgacgatttcctcgacaagatcgagcagatccgcaagggcgccaaggccgaccgccgtggcgcaggcgatgaactgagcaccagcctcaaccagttgcaggaagatgaactgctgccggtggcccgtgctttcaaccagttccttaacctggccaacattgccgaacagtatcagctgattcatcgacgcgatgagtcgcaaccggcacccttcgagtcccgtgttttgcctgagttgctggcgcggctgcaagccgaaggccacagcaacgaatccctggcccggcaattggggcgcctggagattgagctggtcctcaccgcccaccccaccgaagtggcgcgccgcaccctgatccagaagtacgacgccatcgccgcccaactggcgctgcaggatcatcgcgacctcaccacggccgagcgcgagcagatccgccaacgcctgcaacgcttgatcgccgaggcctggcacaccgaagaaatccgccgcacccggcccacgccggtagacgaagccaagtggggctttgcggtcatcgagcattcgctgtggcacgcgattcccaattacctgcgcaaggccgaccaggccctgcacgctgccaccggcctgcgcttgccgctggaggcggcgccgatccgctttgcgtcgtggatgggcggcgaccgtgacggcaacccgaatgtcactgcaccggtcacccgcgaagtcttgctgctggcgcgctggatggctgccgatctgtacctgcgcgatatcgatcacctggcctccgagctgtcgatgcagcgcgccagcccggcgttgcaggccaaggtcggcgatagcgtcgaaccctatcgcgccttgctcaagcaattgcgtgaacgcctgcgtgccacgcgccaatgggcgcatacggcgttgagcagtagcacgccggcacctgccgaggtgttgcagaacaaccgcgatctgctcgaaccgctggagttgtgctaccagtcgctgcacgaatgcggcatgggcgtgatcgctgatgggccgttgctcgactgcctgcggcgggcggtgactttcggcctgttcctggtgcggttggatgtgcgccaggattccagccgccattgcgcggccatgaccgaaatcaccgattatctcggtctgggtcgttacgaagactggaacgaagagatgcgcatcagcttcctgatgaaggagctggccaaccgtcgaccgttactgccgggttatttcaaaccgtcggcggataccgccgaagtgcttaacacctgcaaggaagtcgccgccgcccccgctgcgtcgttgggctcgtatgtcatctccatggccggcgctgcgtcggatgtgctggcagtgcaactgctgcttaaagagtcgggcgtgcaacggccgatgcgtgtggtgccgctgtttgaaaccctggccgacctggataacgcaggcccggtgatcgagcaactgttgctgctgccgggttaccgcgcgcggctgcaaggcccgcaggaagtgatgatcggctactcggactcggccaaggacgccggcaccaccgccgctgcctgggcgcagtaccgggcgcaggaacgcctggtggatatctgccgtgaacagcaagtggaactgctgttgttccacggccgtggtggcaccgttggccgtggcggcggcccggcccacgcggcgatcctgtcgcagccaccggggtcggtggcgggacgcttccgtaccaccgaacagggcgagatgatccgcttcaagttcggcctgccggatattgccgagcagaacctcaacctttacctggccgctgtgttggaggcgaccctgttgccaccgccgccgcctgaaccggcctggcgccatttgatggacgaattggcggcagacggggtcagcgcttatcgcgccgtggtgcgcgagaatccgcagttcgttgagtatttccgccaatccacgccggagcaggaattgggccgcttgccgttgggcagccgcccggccaagcgccgagcgggcgggattgaaagcctgcgtgcgattccgtggatcttcggctggacccagacccgcctcatgctgcccgcctggctgggttgggaagcggcgctgagcaaggccctggaacgtggcgaaggcgacttgctggggcagatgcgtgagcagtggccgttcttccgcacccgcatcgacatgctggaaatggtgctggccaaggccgatgccgatatcgcccgcctgtatgacgagcgtctggtgcagccggacctgttgccactgggtgcgcatttgcgcgacctattgtcgcaggcctgcaaggtggtgcttggcctgactggccagtcgcagctgctggcccatagcccggacaccctggagttcatccgcctgcgcaatacctacctcgacccgctgcacctgttgcaggccgagttgctggcgcgctcgcgccagcaggaagcggcacaggacagccctctggaacaggcgctgctggtctccgtggccggtattgccgccggtttgcgtaacaccggctaaggttttttgcgtgttctcaacggcttgcagataaaccacggcggccgccctgaaacgggcggccgccgattgtgcggccaggttgcacccaggcgcaccctacctatgacgtataggcagcacgggttcctgcgacttttggcggcttgtgtgcttaaggcctgctgtgtatcttgatcagcctttggccgtttgggcggcccgaattctatttttacgcgattggcccgccgcggcgaatccgagcgtcatctctataaaaaattgaggagcacatcaatgcgcgtcattctgctgggagctcccggggccggtaaaggtactcaggcaaagttcatcactgaaaaattcggcattccacaaatctccaccggcgacatgctgcgtgcggccgtcaaggccggcaccgagctgggcctgatcgccaagagcgtgatggacagcggtggcctggtttccgatgacttgatcatcaacctggtcaaggaacgcatcagccaggaagactgcaagaacggtttcctgttcgacggcttcccgcgcaccattccccaggctgaagccctggtgaaggcgggcgtcgagctggatgccgtggtcgaaatcgcggttgaagacgaagaaatcgtccagcgtattgccggtcgtcgcgtccacgaagcctcgggccgcgtgtaccacaccgtctacaacccgccgaaggttgaaggcaaggacgacgtcaccggtgaagacctggtgcagcgcaaggacgacaccgaagaaaccgtgcgtcatcgcctgtcggtctaccactcccagaccaagccgctggtggacttctatcagaagctgtccgccgcccagggcaagccgaagtacagccacattcctggcgtcggctcggttgaagcgatcaccgccaaagtgctgcaagcactgagctgatcccgcgaccggcttcacggataacggcccgcttgcgggccgttgttgtttatactggcgcactttttttcgacttggacacctacaccgatgagcaccctgctggccctggacaccgcgactgaagcttgctccgttgccttgctgcacgatggcaaggtaacgagccactacgaggtgatcccgcgcctgcatgcgcagaagctgttgccgatgatcaagcaactgttggaagacgccggcaccacgctggctgcggtcgatgccatcgccttcggccgcggcccgggtgcattcacgggggtacgtatcgccatcggcgtggtgcagggcctggcgtttgcgctggagcgtccggtgttgccggtgtccaacctggccgtgctggcccagcgcgccttgcgtgaacatggcgtccggcaggtggcggccgctatcgatgcgcgcatggatgaagtgtattggggttgctaccgcgaaacggcgggcgagatgcgtctggtcggtgtggaagccgtgcagccgccggagtcatcgcaattgcctgccgacgccagcggcgattggtttggtgctggcaccggctgggggtatggcgagcgcatcgctgtgccgctggtgggccaggacgcgacgatgttgcctcacgccgaggacttgctgacattggcacgttttgcgttcgagcgtggcgaggccatcccggcggaccaggcggcgccagtctatctgcgcgataaagtggcgcagaccaaggcagagcgcgggattatttgacgccaaaaatgatggcaatttggggctaaattcaccaatcgtcagaatttgcccctggttttaaacctttttcaaattatgtgttctagttatcaccagagcatttgcgcgctacggattgcgccactaaaatgccattactgatagcgagttcgcgcccatgcgtattgatggcttttcctcacagtcttacccaatcaagcgcaagccgcgtaaggcgaacgtcacggtggacgactccgtcgaggactcgccggacttcatcgaagtccaagccgatgcacaggccagcgcccaagcgcgtatcagcggtcttcccgctcgtcagcaagacatggtcttcccgcgctccatgagcaaaagcgtcgctaccgccctggccagctacctgaccaccgccggctttgtcgaatgggatatggaagtgctgggcctcgacatccacatctgatgcgtctgccttactacctcggttgcccgtcctggagtgaaaacgcctggcgtgaatacctgtatcccgccgatgcccgttccagcgactacctcgcgctctattcccaggtcttcaacgccgtcgaaggcaacaccacgttttatgcccgcccctcagccgccaccgtgcagcgctgggccgaaatcatgcccgacgacttccgcttcacggccaaatttcccggtgacatcagccacagcggtaacctgaccgagcagctaccggcagcggaaagcttcgtgggcctgatgagtccgttgggtgagcgggtatcgccactgtggttgcaactgcccgcgtcgttcaccccgcagcgcctgggggagttggcgggtttcatcgatggcctggagcggccgatggcggtggaagtgcgccacctggaatttttcgccaagggggacgccgagcgcatgcttaaccgtttgttgcgtgaccgcggcgtggagcgcatctgcctggatccgcgcgcgctgttcagttgcacgtccacctcggccgccgtgctgcacgcccaatctaaaaagcccaaggtgccaccccgtccggcggcgctgacgcagtttccccaggtgcgctttatcggccatcccgaactggaggccaacgatccgttcctgaagccatgggtggaaaaagtcgctggctgggtcgaagaagggcgcaccccctacgtgttcctgcacacctcggataaccgcctcgccgcgcaactggccctgcgtttccacgatcaactgatggcacgcctgccaggcctgccgcccttgcaggtgttggatcgcgctcccgccgtggagcaactggggttactctagggttcctttttccgccaggagcccgacatggatgcccaaacccttcgcgccgaaaccttcaaggccttgcatgagcgcgaccgtgcgttcgtgatgcctaacccgtgggacgtaggctccgcggtgatgctggccagcctgggtttcgaagcactggccaccaccagtgcgggttacgcgttcagccttgggcgcccggatgcggaaggcgcgttgtccctggacgacacgttggtcaatgccggcatgatcgccaaggctaccgcgttgccggtggctgccgacctggaaaacggcttcagcgacacacctgaaggctgtgcccagaccatcctgcgtgctgcgcaagtcggcattgtcggcggctccatcgaggacgccacgggcattgccgccgacccgatctatccctttgacctgtccgtcgagcgcgtggaagccgccgtcgccgccgcccgcagtctgccatttcccttcaccctgacggcccgtgcggaaaacctcctgcatggccgcctggatttgcccgacaccatccgccgcctgcaagcctacgccgaagccggggccgacgtactgtatgccccggccctgcgcagtgccgaggaagtgctggcggtggtcaaggcggtggcgcccaaaccggtgaatgtgttgatgtccggtggcttgaacctgagtgtcgcgcagttgagcgagatgggcgtgcggcggatcagcgtcggctcggcgctggcgttggcggcctacggcgagttctaccgcgccgcgcaggaggtgtatgagttgggcacgtttaccttcaccgagcgcaagatgccgttcagccaggccaaccaattcttcaagggctaagcggtgcgttttttcaaagtgctgggcctgctgctgatcctggcgggtgccgttgccgtgggtgtctggcgtggatgggtgccactaccggccgattggaacccgtgggcaccgctggacgtacgcgccaaccccaacttcttgactcgctacaagctgggccgtctacagggtgacccggcactgtgcgaccgggtgctgcaaacctcgggcctgcgcgtcagtcatcaggcggactcgccggcagatggcgcttgccccttgcgcaataccttgcgcgtacagggttctgcggttgggctgagcagtagctttctcgccagttgcccactggcggtggcgttcgccctgtttgagcggcacagcttgcaaccggcggcccaggcggtattcggccaggcagtgacgcgggtcgatcacctgggcagctttgcctgtcgcaatatctataaccgtgccgaagggcgactcagccagcatgcgtcagccaacgcgctggacattgccggttttcgcctggcggatgggcgcagtatcagcgtgctcaaggactggcctggggagggcgataaggcacggtttctgcgtcaggttcgcgatagcgcctgtgatgatttcaatgtagtgctcagccctgaccacaacgccgcgcaccgcaaccatttccatctggatatggggcgttggtgggtgtgtcgctgaggctcaggcggccaagcgcaggttctgggtgaccagtgggcgagcccagtagtagtcgaagtccagggctttttgttgcgcgaccagttcttcggttggatacggcgtggcggcgggtggcagcaggtccagttcgaattcggcgatgggcaggtgcagagggcgcggctcaggggctggacccggctccggcagcggctggccggccgttaacacgatggggcggacccagccgctttcgaaattctgctggcgttgctgggcgacgatttcttcttccgggaacggtgtggcggcgggtggcaacagctcggtttcgaactcggcaatcggcaggaacagcggctccggtggagcaatctcggtgtctttcacatcgcactcacgctgggtgaggatctgcgacaacaggtcggcgccggcgctgggttctaccgctgggtccgccggtgctggcgcctgcacggcgagcgcgtcgggcgtctcgccaagctgctcggccaaggccctggcgaagaagtcctgccacacatgactcaccccggccagcgcttgagtattgcgcaggccgtagtggttgtgggtcggcagtacaccgatggttaggggaagaatgtctgacatttttctcggtcgacgctcagctctggcaaaatacctgactgttgtttttatcggccgctgtttgccgatccttaatatttttgagcgtagcgattgatgagcgaacaaccagcgaccagccgcatccaggtcgaggccttgggcgaggttttccaggcccgcgccgagcaatgggcgcagcggcttggcttgcctttgcagcaggcagatgcggacttttccctgcaagtgggggagcatggcctgcaattgcaacagctcggggctgacgcgccagggccggtgcgcgtggattttgtcgaaggcggcgcggcgcatcggcgcctctatggtggcggtagcgggcagatgatcgccaaggccgtgggcatcgcccaaggcgtgcgcccacgggtgctcgacgctacggctggcctgggcaaggacgccttcgtgctggccagcctgggttgtgacatgagcttgatcgagcgtcagccgctgatcggcgccttgctcgaagatggcctggcgcgcggcgcggatgattttgaagtggcaccgattgtggcgcgcatgaagctgctcaagggcaactccatcgacgtgatgcgccagtgggagggcgagccgccccaggtgatctacctcgacccgatgttcccgcaccgtgagaaaactgccctggtgaagaaggaaatgcgcctgttccggccgttggtgggggatgatcccgatgcgccggcgctgctggctgccgccctggccctggctagccaccgcgtagtggtcaagcgcccgcgcaaggcaccgtgcattgacgggccaaagccgagccatgcgctggatggcaaatccagtcgctatgacatttatccgaagaaagcgctcaaaccctaagattgaaaatgccctgtggcgagcgtgcttgccacagacaatgggttacggcctgtaggcccgcataaacaaccccaccacctcttgcacatgggcttcggcggcttcttcactcagttgcccgccgcagccatacagcaagcagaaattcgccgtgcccttgagcaggcagaagaaatgctcggccgccgtaaagggtttgtcgatgctcagcgcaccactctggtcgatcttgccaagcagtcgctccataccttgcagcatgcgcatggggccggcctcgaagaagatctgcgagagtttcacgtcctggttgccggtggtcatcatcaagcgatgcaggttgaccgactcttcactgttgatcagccgatggaacccccgcgcgatattcaacagcacagtttgtacgggtatgccctcgggcaactcgaagtacatcaccggcagttgttcttcgcacttggccaccaccgcggcggtgaacaaggtctctttatcgttgaagtggctatagacggtcagtttcgacacgccagcttccagtgccaccgcgtccatgctggtactggcgtagccattgctcaaaaacaggattttcgctgcttcgaggattgcctggcgttttgccatgtccttggggcgcccggggctattggtgttcagaggattgtcggacattttcacctttaatactggactggcgagtttggtattaataccatacccgccagtataattattcctagctctacttgcgaaaggtcctacagcatgcgcagcaccttcctgccctttgctttgcctgtcagtttggtcgtgctgttgaccgcctgcggccatgaagaagcggcccagattaccatccgcccagccatggtggtgcagcctcagccttcttcgcagtcgatggacagctaccccggcgaagtgcgcgcccgctatgaaccggacctggcttttcgcatcggtggcaaagtcagcaagcgtttggtggaggagggcgaacgggtcaaggccaaccagccgctggcggagctggaccctcaggacgtgcgcctgcagctggaagcgacccgcgcccaggttgccgccgccgaggccaacctgagcctggtgcggaccgagcgcgaccgctacaagaccctgatggaccgtcagatggtcagccgttcccagtacgataattccgaaaacctctaccgatccggtgaagcacgcctcaagcagatcaaggccgagttcgatgtggccagcaaccaggccggctatgccgtattgcgtgcgccccaggacggagtggtggccaagcgtgcggtggaggtcggccaagtggtgtccgccgggcaaaccgtgttcaccctggctaccgatggcgagcgcgaagtgctgatcagcctgccggaacaaggttttggccggttcaagatcggccagccggtgtcggtagagctgtggagccagccggatcagcgttttaccgggcgtattcgcgagctgtcaccggcggccgatcccaagtcgcgcacgtttgcggctcgcgtggcattcaccagcggcaaggtcccggctgaactgggccagagcgcacgcgtattcatacaggtcgacggcgatgttccgttgtcagtgccgctgtctgccctcagtgcggagaacggtgcgtcctacgtgtggcgcgtgcagcccgacaacacgctcaaacgcacgccggtgcgcattggtgccttcggtgaaaaaaccgtcccggtcctggaaggcctggccccgacggattgggtgatcgctgcgggtgtgcacgtgcttcacgagggccagcaagtgcgcccggtggaccgctccaaccgtgtggtgaatctggcggccaaggagtagtccccgatgggtttcaatctttccgaatgggcgttgcgcaatcgccagatcgtactgttcctgatgatcctgctggcagtggtcggcaccttgtcctactccaagctggggcaaagtgaagacccgccgttcaccttcaaggccatggtcatcaagaccaactggcctggcgcaacggcgcaggaagtctcgcggcaggtcaccgaacgcatcgagaaaaaactcatggagaccggcgagtacgaacgcatcgtctctttttctcgcccaggtgagtccactgtcaccttcattgctcgcgactccatgcactctgtgcagattcccgaactgtggtaccaggtgcgcaagaagatcagcgacatccgccagaccttgccgccggacattcaggggccgtttttcaatgacgaattcggcaccaccttcggtaatatctacgccctgaccggcgacggtttcgactacgccgtgctcaaggactacgccgaccgcatccagattcaactgcagcgcgtcgcggatgtgggcaaggtcgagctgctcggcctgcaggacgaaaagatctggatcgagctgtccaacctcaagctggccaccctcggcttgcctttggcggcggtgcaacaggcgttgcaggagcagaacgcggtctccactgcgggcttcttcgaaaccccgagtgaacgtgtgcaactgcgtgtatcgggcaacttcaagagcgtggaagagatccgcaatttcccgattcgcgtgggtgaccgcaccttccgcatcggcgatgtggccgacatccaccggggtttcaacgaccctccggcaccacgcatgcgttacatgggcgcagacgcgattggcctggccgtggcgatgcgcgacggcggtgacatcctggtgttgggcaaagccctggaaggtgaattcgcacgcttgcagaagaacctccctgcgggtatggagttgcgcaaggtgtcggaccaaccggcggcggtgaaaaccagcgtcggcgaatttgtgcaggtactgaccgaggcgctggccatcgtgttgctggtgagtttcttctctctcggcgtgcgcactggcatggtggtggccctggcgattccgctggtgctggcgatgacgtttgccaccatgtattacctcggcatcggcctgcacaagatttccctgggcgcactggtgttggcgttgggcctgctggtggacgacgcgatcatcgccgtggagatgatggcgatcaaaatggagcagggctatgaccggctcaaggccgccagctttgcctggaccagcaccgcgttcccgatgctcaccggtacgctgatcaccgccgccggcttcctgccgattgccaccgcgcagtcgagtactggcgagtacacccgttcgattttccaggtggtgaccattgcgttgctcgcttcgtgggtggccgccgtggtgtttgtgccttacctgggggaaaagctcctgccggacctggcgaaaattcacgcagccaaacatggcaccgatggtcctgatccctacggcacacctttctaccagcgcgtaagacgtttggtggagtggtgcgtgcgtcgccgcaaaaccgtgatcgtcctgaccctgttgctgtttatcggctcggtcgccctgttccgttttgtgccacagcagttcttcccggcctccggtcgcctggaattgatggtcgacctgaagctggccgaaggcgcctcgctgagcaacaccgctgaccaggtcaaacggttggaaacgctgctcaaggatcacgccggcatcgacaactacgtggcctatgtcggtactggatcgccgcgtttctacctgccgctggatcaacaactgccggccgccagttttgcccagttcgtggtgctggccaaaaccatcgaagagcgcgaaagcctgcgcacctggctgatcgaaaccctcaacgaacaattccccgacctgcgttcacgggttacccgcctggaaaacggcccgcccgtgggttacccggtacagttccgtgtgaccggcgaacatatcgaagaggtccgcgcgctcgcccgtagagtggcggccaaggttcgtgaaaaccctcacgtggtcaacgtgcacctggattgggaagaaccgagcaagatcgtctacctcaatatcgaccaggaccgcgcccgtgcccttggcgtgagtacggccaacctgtcgaaattcctgcagagttcattgaccggctccagcgtcagccaataccgcgaggacaacgagttgatcgaaatcctgctgcgcggcaccgttcacgaacgcaccgaactctcgttgctgccgagcctggctgtgccgacggacaacggcaaaagcgtcgcgctgtcgcagatcgccaccctcgaatatggcttcgaagaaggcatcatctggcaccgcaaccgcctgcctacggtgaccgtacgcgccgatatctatggcaaggaacagcccgcgacattggtccagcagatcctgccgaccctggaaggcgtgcgtgccgaactgccggatggctacctgctcgacgtgggcgggaccgtggaggattccgcccgtggacagaactcggtgaaagccggggtgccgctgtttatcgtggtcgtgctgaccttgttgatgctgcagttgcgcagtttctcgcggaccgcgatggtgtttctgacggcaccgctgggcttgatcggggtgaccttgttcctgctggtattccgccagcccttcggtttcgtcgccatgctcgggaccatcgccctgtcggggatgatcatgcgtaattcggtgatcctggtggaccagatcgagcaggacatcaaggcggggctggcaccgtggcaagcgatcatcgaagccaccgtccgacgcttccgcccgattgtgctgaccgccctcgcggcggtattggcgatgatcccgctgtcgcgcagtgtgttcttcgggccaatggccgtggcgatcatgggcgggttgattgtggcgactgcgttgaccctgctgttcttgccggccctgtatgctgcgtggttccgagtgaggaaggacgtcgcgtaatcatgctggccaccgtttcagccctgatgttgttgttgcttgccccaggccctaccaacaccctgttatttcgtgcaggtgtgttgtgtggcttgcgggcttcgtggaggctggcatttgtcgagtgcctggcgtacctgctgcaagtttcggtatggggcgtggcattgctgtatctgtcggcgtactcgccatgggcgctgaaggcaacgcaattggcggcagcctgctacttgctctatgtctcctacaagctttggcagcgtaagaacagtgtcatccaccccggttccgaccgtttctccgggctgtacttcttctggctgacggtgatgaatcccaagggattgctgatcgtgtcattcattgcaccgttcggcacctttgccacgctacccggctatgccgggttcatggccacgctggtgctggtggtgattccagtgggggcggggtggatcatgctgggcagccgctttgaaggaattcaaaaggcctggctcacgccattgaagatcaaccgtgcgacctctattgcgattggctgctttgccacgctgatggtggggcggttggcggaatcgatggtgaattgagggagcgcgcgtctcagatttgatgtttattgagatagttgcagttttctgctgtactcaagtctcagaaatcgaaaaattgagattttgatgatcaagttgccaccgagggtgccggaaggggttttcgttttaattggccaggaaccccatcttcagcatctttctgactatatgaagctgactcagccaaccgatagccaggggcgttacttacactttgatcaactacgtcaccgcttcccaaagcatttggatcaggcgatatgctggggcatcgtaaaatacgagcgctctcgtctgtaccagcaaatattgcccgtcggtacgcctgaggcctggtgcaagtttttactgacaccgaccgcacagcgcgtggtatccacggtcgacaggtacgcctcaactgcagcacttgagtacatgagcagcaagattgggaaggccgctcacatcaagtatctgctcaatgatttgattgaagatgaagccatcagcagcagtcagctggaaggggcagcaaccacgacgctcgtagcaaaagatatgttgaaaagagagcggctacccagaacacccgatgaaaaaatgatcattggtaattaccggatgatgcgtttcgcttgggataagagaaacgctcctctcagtgccgaactgatcgctgaaatgcatgaggtgggtgttcaaggcattgacgatgacaaatattctcccggcagctttcgtctaaatgatgacgtagttgtccaagatggtgatagcaatgtggtccatacgccccctcctgcagaaggcatcgccaaaagattggggcgattagctgactggatcaacacgtgccacgacgacgctacgacaagccgctacctccatccgttgatcaaaggtatttctctgcattttgcgctgggttacgagcacccttttcgggatggcaatggtcgcgtggcgcgtgcgttgttttattggtttatgtttaaaagcgattacgcggcattcaggtatatctccatcagtgttctgcttaagaatgccgccgttcagtacggtacgtcttacctctataccgagacagatgaactggatctgacttactttattgactaccagtgctctgtggtccagcgggcggttgatagcttcaagacgtcttacgaagaaagtgttaaggaggctgagtcgttcgagcaatggctctgggagtcagggctatacaaagagttgaacgagaaacagaagactgtatttcaggtcgccaagagtggcaccgcgaagcagttcactgcggtcaatgtgaaggaaaatctgggctgttcctacaacacggcgtcagccgtcctgaacggtcttgttgaattgaacatcttcgtcaagaagaagcagggtcgtgaatgggttttttcaatgcgtgatcaagcagaaatacaaaaaaactggttgaagacttctcgttaatttaacgaatgcccacgtcttcttgaaccgtgggcattacgggtattacagcgccccaaacaccttcttcgccaaactggtagccgccgccgccgggttctcgcgaatggtttcttcctgcttggcaatcatcttgaacaaaccgtccagtgcctgctcggtcacgtagttctcgacgttggcgctcttggcgtccaccgcaccgaaagccgcagccttgccggccagggcattgtactgctgggctacgccgaccttgtcggtagcggccttgacgatgggcaggaacttggcgcggatctgttcacggctgcttttgttcaggtattgggtggcggagtcctggccgccgctgaggatgcctttggcgtcggtcacgctcatgttcttcacggcgttgaccagaatcggctgggcctgggtcacggcggtttcagcagccttgttcatgctggtttccaactgcgtgacctggtcacccatgccgaacatcttcagcttgtcggcgactttacccagcttgcctggcaggccgatcttcacttccgggttgttgctgaaaccaccgggtacacccagttgcttcacggcgatctgcgcgccttgggtcagggcgtccttgaggccgccgctggcgtcgccctgggacaggctgctgaggtccagggccatggcgttggcaccgagcagcaggccggcacacagggcagtcaggcgaagggagttacggagcatggacgcttcctttttatcgaattcagtgggccaccgcgtcaacgcgcagacgcagtggttgaggatcctggccattgagctgcacagcgtgccgctcggtggtgataaacagtagcttgccatccacttcgatgcgagcgctcaccgagtagctgtggccgggtttgacctgggccgggtcgtagctcaggtgaaacggcagcggcacctggcctttgaccgggcctttctgctcggcgagggtcacagccggtgcatctgccagggaaacgtcttgcaggctgacactcaaggtcgcggttggcggcagggcgatgcgttgcaggtagaacacttcgccatcgaggctggccttgggggtggggctcatggactggcaggctccgagcagggcggtaaggcccaggaggatgatctttttcatggtgtcgctccttttcaagggcgccggcatccaaccggcgccttttcaaatctagcggttttcttcaggttcgatgggtatttcggccgcgccatccacacgatgcaatgccacctggcggatcgacaggcgaatctccgccggcaacacgcgcttggccgcgccttctgccagttcgccgagcaggtcgtgatagctcagcttgccggcttcatcgcggcgcagcacatcttgctccagtaaggtctggatgaaatgtcggaaaaggctcttgtcgaagaattccggggcgttgaggccatgcaggatcgacaggcgctgggccatgatcgtgcacaggtcttccagctcttcggcgctgatgctgttctggccgctgttgagcagcagcgaaatcgccatgtagaagcgttgcagggtctgggcgatgctcttggacagcagcgtcagcaacacaaagtgccgcgaactcggcgccgggcgcaggtacacgttgttttcgaaacgcagcaggccttgttcgacaaaggcttccagccactggtcgatcacgctgtcgagttcttccagcgaccagcggataaacagctccgattgcaggtacgggtacagcgcgtgggtgtagcgcaggatctgctcgcggctcatccgcgagctgctctggaagaaactcgccagcagcgccggcagggcgaagatgtgcagcacgttgttacggtagtaggtcatcaggacggcattctgctcgtccaggtacagaatcttgcccagggcatcactctgctccgacagcaggtccatgtccttgacgtgcttgatcagcgccaggccatcgccttcgggcagggtggtgtggggcgagtagggcacacggcgtaacagcgccaggtacaggtccaactggcgcgccatggcttgctcgtccagggccaggcgcgtggtggacagcagcgcgagggcgaccaggttcaccgggttcacggcggcggcttcgttcagatggcgcgccacctgttcgccgaggcggttggtggtttcgttgagccaggctggcttgtagttcggccccagttcctgggagcgccagtccggttgctcgctgtcgaggaattcggccagcttgatcggctcgccaaagttgaccgcgacctggccgaagcgctgtttgagcgcgccgaccaccttgaaaatatcgaagatcgactctttcttcttgctcgcgccacgcagttcgcctagataggtacggccttcgagcacgcgctcatagccgatgtacaccggcacgaacacgatcggcatgcgcgaggagcgcaggaagctgcgcagggtgatcgccagcatcccggtcttcggctgcaacatgcgcccggtgcgcgagcgcccgccttcgacgaagtactccaccgggaagcctttggtgaacagggtgtgcaggtattcgttgaacaccgaggtgtacagcggattgcccttgaaggtgcggcgcatgaaaaacgcaccgccacggcgcagcaggctgccgattaccggcatgttcaggttgatcccggcggcgatgtgcggtggggtcaggccattcttaaacagcaaataggacagcagcaggtaatcgatatggctgcgatggcaaggcacgtagatcacctcgtagccctgggcaaccttctgcacaccttcgatgttattgaccttgatgccgtcgtagatcttgttccagaaccagctcagcaccacttcgagaaagcggatcgcggtgtaggtgtagtccgaggcgatttcgttgccgtagcgcaaggcctgggccttggctttttccgggctgatcttttcccgttcggcctcctcaatgatggcctggcgcaccagcggcatgttgaccaggcccttcaccagattgcgccggtgggacagatcgggaccgatcaccgccgtcttcaggttacgaaagtgcacacgcaggatgcgctgggccatgcgcaccgtgcgttcgtgccctttattgtgctcgatcaattcacgcaggttgataggcgcagagaattgcacgcgggttttgcgacccaggatcaggatgctcaacaggcggcgtagacgcccggtgaccgcccagctgtcggcgaacaacagcttccacgggctggactcgctctcgggggactggccccagaacacgctgaccggaatgatttgtgcattctcttcggcgtgctcgctgagggtatcgaccaagcgggtcagcgtgggcggtgcgccgcgcttgtcctggcgaccgagccagtccggttccggggtgaggtagaagaatgccgccggttccatcagcgggccgaccgaaaccggcagcaccgggcgcggcaggccggccttggtgcactcggcatcgactacggccaattcggtgagggagggtgattgcaggacgtagaacaccggccggctgcggtccaggttgagggttagggacgactggttgatcgtctccgagcgaacccagaggtacaacagtcgacgcaaggtgccaaacactagacggcggaacggggagcgggtcataggcgtgctgcttcaagtggaaaaaaccgagcaggcgctcgggcgagtagtgtgccgtattcgccgaaaatcggcaaaaaagcagcgaagtaaacttgagttgatcgtttttgagcctgtcttatactcggcagttcaatgcgactgactcaacaataaaaaacagtgggagcaaaaacagaatggcaacgcgcgaaactggcaatgtgaagtggttcaacgatgcaaagggctatggcttcattcaacgcgaagacggcaaggatgtgtttgtgcattaccgtgccattcgcggcgaaggccaccgctccctggccgagggccagcaggtggaatacgccgtggtgaccggcgagaaggggttgcaggcggaggatgtggtcggcctttaacgcgcgctgaacccctgttgtggtgagcgggcttgaactgtggtgagcgggcttgccccgcgttgggctgcgaagcggcnnnnnnnnnnnnnnnnnnnnnnnnnnnnnnnnnnnnnnnnnnnnnnnnnnnngccgcttcgcagcccaacgcggggcaagcccgctcaccacagcaagcgcgctcaccacacaagcccttccctcatgctttcaggatcaggcggttttccaggtgatctgctcttcaccgtccacgctgatgcgaatccaggtatcggcgctttcttcgccttcttcctcgacccaggtccccggtgcacaacgcacttccacgttcagtgcagcaaacgcagcacgggcgcaggcaatgtcgtcgtcccacggcgtctggtcactttccaggtacaggctgttccatttgccgacggctttgggcagccaggtgaccggcacgttgccggccttgcatttgtaggtctggcctttctggacccagtcggtgcacgggccaatggcggcgcccagccaggcggcaatggccttgtggtcgacgtcggcgtccttcaggtaaatctcgatatcgggttggcgcatggatgttcctcgttgcgggattcgaaaatccattcgcggatactggacagtcagttattgaagcacgaaatagtcgtagcgcatcgacacagtgaccaccagcggctcggccgcctcgatcacgtgtgcccggcgctcggcgcttgcacgccagccatggggcgtcatcgccagcaggttggcgcggtcctggggggcggccaggctcagggggaattccagcgtttcgctgtgtgccaggctcatgccgtccggcaccagggccaggtgtttgtcgtcggtgtattcacgcacttcgtcgtacaggcgctcgcgcaattccatcaggtggccgctggtcgggccgaccttcatcaggccgccaccggggctgagcaggcgcttggcctcttcccagtccagtgggctgaacacgctggcgagaaattggcagctacctgacgccaatggcacgcgggccatgctggcgatcaaccaggtcagcgccgggttgcgcttgcacgcacgcttgaccgcttccttggaaatatccagtgcgtagccgtcggcgtggggtagggcttcagcgatctgtgcggtgtagtagccctcgccacagccgatatcgacccagcactgcggcgcgcgttcagcggcgagttcggccaggcgcttggccaccggggcgtagtgcccggcgttgaggaagtcgcggcgcgcttcgaccatggccaggttatcgcccgggtcgcggctgttcttgtgctgcaccggcaacaggttcaggtaaccctggcgcgcgcggtcgaaacgatgcccggccgggcacgccacgccattgtccaccgcgttgagcggggcgttgcatagggggcaggcgagcatcaggcgagcaacttgatcagggtctggtagtagatttcggtcagcacatcgaggtcgctggcgaggatgcgctcgttgacctggtggatcgtcgcgttgaccgggcccagctcaaccacttgggtgccgagggtggcgatgaaccgtccatcggaggtgccgccgctggtggacgcctgggtctcacgcccggtgatcgccttgatgctggcggataccgcatccagcagcgcacccggttcggtgaggaacggcaggcccgacagcgcccactccacgtgccagtccaggccgtgcttgtcgagaatctgtgctacgcgctgctgtagaccttcgacggtggactcggtggagaaacggaagttgaacaccgccgtcaggtcaccggggatcacgttggtcgcgccggtgccggaattgaggttggagatctggaagctggtcggcgggaagaaggtgttgccgtcatcccaatgctcggcggccagttcggccagggccggtgctgccaggtggatcgggtttttcgccaggtgcggataggctacgtggccttgcacgccgcgtacggtcagggtggcgccgagggagccgcgacggccgttcttgaccacgtcgcccaccaacgtggtgctcgatggttcgccgacgatgcaccagtccaggcgttccttgcgtgcagccaggcgttcgatcacagccttggtgccgtggtgcgccgggccttcttcatcgctggtgatcaggaaagccaccgaacccttgtggtccgggtagtcggcgacaaaacgctccgacgccaccagcatggccgccaggctgcctttcatgtctgccgcaccacggccgcaaagcatgccgtgttcatcgatcaacgcgtcgaacgggtcgttctgccacgcctgcatcgggccggtcggtaccacgtcggtgtggccggcaaagcacagtaccgggccatcgtgcttgccatgggtggcccagaagttgtccacgtcttcgatgcgcatcggctcgagcgcaaaaccggcgtcgcccaggcgctgcatcatcagcttctggcaatcggcgtcgatcggcgtcaccgaggggcgacggatcaggtcgatggcaagttgaagtgtcggcgaaaggtcggcatgggccgtcatggggaactccggaagcatgtgatgggcgcaggacgtaaggggcgcagattcagtgtgggagggggcaagtcgaatcgtcgcaccgcccctcccacacaaagcattggcctgggccaagactcataaaacggccgttatcttatagcaaaacggcggccagaggccgccgtttagtgcattgcgcgagtttttacgcagccggtgcgggttccgctgccgccgccggtttcggcagcgaagacaggaacgccatgaccagcgccgccacatacggcagcgactgcaccagcaacatcaccacccagaagcggatgtcattgctcggcaggccctgcaccaggtagatccccagcgccgcgccccacaacagcagcatgatgaacatctcttcgcgggcttcggaaatcgccacccagaagccgtggttatcggcgtttttcggtgtacggaagaacgggatgctggtggtgaagaagccatacagcaccgccttggcgatggtgtgggacaacgccagaccggccagggccgcgcagaatgcgtccttcaagttcacgcccaccgcacgccggtacaggaaaatgatcttgcccaccttgaacacgaacagcgccaacggcgggatcgcaaaaatcagcagcggcggatcgacccgcgttggcacgatgatcattgccgccgaccacagcagcgcgcccacggtgaagaagatgttcatgccgtccgctacccacggcagccagcccgcaaggaagtggtagcgctggccacgggtcagctcggtgtccttgccgcgcaacaggctcgcggtgtggcgcttgatgatctggatcgcgccgtaggcccagcggaaacgctgtttcttgaagtcgataaaggtatccggcatcaagcccttgccgtagctgtcgtggtaatacgccgccgacaggcctttctcgaacacccgcaggcccagttcggcgtcttcgcagatgcaccagtcggcccagcccagttcttcgagcaccgagcgacgggtcatggtcatggtgccatgctggatgatcgcgtcacggtcgttgcgggtgaccatgccgatgtggaagaagcctttgtattccgcgtagcagagcttcttgaaggtgctttcgttctggtcgcggtagtcctgcggcgactgcaccacggcgattttcgggtcggcgaagtgcggcaccatgtgcttgagccaattcggcgagacgcagtaatcggagtcgatcaccgcgatcacttcggcatcctcggcggtgtgcgggatcaggtagttcagtgcgccacccttgaaaccggccaggggcgcgacatggaagaacttgaagcgcggtcccagggtttcgcagtaatcgcgcaccggctcccacacggccgggtccttggtgttgttgtcgatgatcaggacttcgtagtccgggtaatcaagggcggccagggcgtcgagggtctgtttgaccatctccggcggctcgttgtagcacggcacatggatcgacactttcgggcggtagtccgaatcccccaccactggcaggaattcgcgccggcgcttgtgggtccagaccgcttccgccagttcatgggcttcggtcagcaacacgataaacacgcccagggcaccgagggccaggagaatgcccacggtgacactgaaccaggtgctgtattgctggctgtagtcgtagccgatccacaccagcaccgaaccgcacaggaatgcgataaaggtcaggaaggtgcggccgcgctggcgcagggccgagccgtcgatcatcagcagggtcagcgacaacagcgcgagcaccaccgaaccgatggccagcacgcgccactgcgggatcgcgaccacggggccttcaaagttgaatttctgctggcgtgcggcgttgtacacgccccagtaggcgcccgccgagccttcgtcgctgactttccacggctgatcgaaggcctcgatcacgaagtagttgtagccctggcggttcagcttgttcaccagcgtgcgcaggtaaatcgcctggtcggccggggaggtttcgttacccccgcgcatgcgtccgttactcggccagcccacttccgacagcagcagcggctttttcgggaacagtttcttcaggtcacgggcacggtcgagtacgtattggccggccttgtccatcgggatgtattcccagaatggcaggatgtgcgcagcaatcaggtcgacgtgcttggccagttgcgggttcttttcccagatgtgccactgttcggaggtcgtcaccggtactttcacagcggcgcgcacccggtccagcagcacaatcagcgcctcaggggtgatttcttcccggaacagcgcttcgttacccaccactacccgcaccacactgcgcgagctgttggcgatttcgatggcgcgctggatttcccgctcgttgcgttccaggtccgggctgatccagatccccagcgtcacgcgcaggccgaactcttccgccagcttggggatgtcccccagggtgccgtcgaccgagtaggtgcggatgttgtccgtcagcttgctcatgattgcaaggtcttgacgcatctggtcgtcggttgggtactggtctttctgtgggaactggccttgttggaacggcgagtaggaaaaaccggagatctgttcaggccagttgggggtggtgacggggcggttgatcagcgcccagaagccggtgaacagcgcggcgattgccagcacgatcaccaggttgagtccaaatttacgcgatgccatggctatttcgggttccaaaaggtgtggaacgaaaagaggtgtcggcctgcgccgaacggcgcgcatcctacaccggcgcttccctgaccgtacagcaagcagagaaaaaccggacattagtcagcgaaaggccatcttagttcttaacttgtagcttgaggcttcgaacttgtcgctgcgtagccctataatgcgcgccggtttttggggtaatggtcatgagtacagaagatccgcggtttgcaggcgtcgcccgcttgtatggcattgaaggcctggaacgcttgaaagcggcccatgtggcgatcgtcggcgtcggcggtgtgggctcgtgggcggcggaagccgtggcccgttgcggggtgggcgagatttcgctgtttgacctggatgacgtctgcgtcagcaacagcaaccgccagttgcatgccctggacagcaccgtaggcaaacccaaggtcgaggtgatggccgagcgcctgcgcggcatcaacccggactgcacggtgcatgcggtggccgacttcgtgacccgcgacaccatggccgaatacatcacccccaacatcgattgcgtgatcgactgcatcgacgcggttaacgccaaagctgcgctgatcgcctggtgcaaacgccgcaagatccagatcatcaccaccggcggcgccggcgggcagatcgacccgacattgatccaggtgtgcgacttgaaccgcaccttcaacgacccgttggcgtcgaaagtgcgctcgaccctgcgccgtgactacggtttctcgcgtaccgtgacccgccattacagcgtgccgtgcgtgttttccaccgagcaactgcgttaccccaagccggatggcagcatttgtttgcagaaaagttttgtcggggatggcgtgaagctggactgcgcgggtgggtttggcgcggtgatgatggtgaccgccacgttcggcatggtggcggcgaccaaggcggtggacaagattgtggccggggtgcgtaggccgtcggagcgggtcaagcccacttaaatctaggaacccgacataattcaaatgtgggagggggcttgcccccgatagcggtggatcagccaacttgttcagtgactgacaccctgcaatcgggggcaagccccctcccacatttagctttgtttatgactgatttcgcgcatacgttgcagcaccgcgttgaggccattgctgcgcgacggtgacagttgacgggaaagccccaattgattgaaccagtcgggcaagtccacggccagcagctcggcagcagaaagcccattgacccgcgccagcagcagcgccaccaacccacgaatcatccgtgcatcgctgctggcggcgaactgccagtggccgtcctgcaaacgccccaccaaccacaccaggctttcacagccctgtaccaggttggcgtcgactttgtcctcggcggccagggcaggcagccgttcgccccactgcatcagcatccgcgcgcgttgttcccaactgccgacggactgaaaggcttccagcgcagcaaccgcctccattggcaggctcatcgcagcatatccagcgcctggtccagcgcttcaaagaagcgttccagatcatccgaatcgttgtacagcgctagagacacacggatcgcccctgacaactccattgccttgagcagcggcattgcgcaatggtgtcctgcgcgtacggcaatgccttgctcggtgagcaagtgcgcaagatcagcgttatgcacgccatcgacaacgaagctgaccaacgccacctgcggcgcgcccagtatgtgcacgccattgcgcgctttgagcccacgcaacaggtagtcatgcagcgccgcttcatgggcgacgaccgcttgttggtccagcgaattcaggtaatccaggctggcacccaggccgatcacactggcaatcggcggggtgcctgcttcgaaacccagcggcgccgggcggaaactggcgctgtggtagtcggcctgttgcaccatctcgccgccaaactgccagtgtcgcaagtggtgcagggctgcgttgcggccaaacagcacgccgacgccatccgggccatagagcttgtggctggaaaacacatagaagtcgcaacccagggcctgcacgtcgtggcggccgtggacgatgccttgggcgccatcgaccacggtcagtgcgccgtgggccttggccgcagtgatcagcgcttccagaggctgccaggcgccgagcacgttggataactggctcaccgccagcaggcgtgcgcgcgggccgatcagcgcggcggcggcttgcaggtcgatcacgccgtcatcattcaacggcagcaccaccagcgtggcggcgcggcgtttggccagttgctgccagggcagcaggttggcgtggtgttccagggcgctgacgacaatctcgtcgcccgcattgaataagtgctcaaggccgtaggccaagaggttcagcgcagaggtcgcgccgtgggtgaacacgatctgcccactgtcgcctgcattcaaccactgcgcgaccttgctgcggctgtcttcgaacgcctgggtcgcatgggcgccgggcaagtgctgggcacggtgcacattggctgcgccattggcgtagtaatggctgatcgcatccaacagggcctggggcttttgtgtggtggcggcgttgtccaggtacgtctggtcttgccgttgcagggtggcgatggccgggaaatcggcgcgccagggggagggcactagcatggtgttcaagactcgtataagcgagccccagggtcggggcccgctagtggcatcgagtggctgcttagttgtgagcgtgcagcgcttcgttcagttcgatggccgatttgtgggttttgcactccacggcaccggtctcggagttgcgacggaacaacaggtccggctggccagccagttcgcgagccttgaccactttgaccagttggtttttctcgtccagcagcgcgaccttggtgccggcggtgacgtacaggccggactccacggtgttgcggtcgcccaacgggataccgataccggcgttggcgccgatcaggcagccttcgccgaccttgatcacaatattgccgccacccgacagggtgcccatggtggagcagccgccacccaggtccgagcccttgccgacgaacacgccggccgatacacggccttcgatcatgcccgggccttcggtaccggcgttgaagttgacgaaaccttcgtgcatcacggtggtgccttcgcccacataagcacccaggcgcagacgcgcggcatcagcgatacgcacgccgctcggcactacgtagtcggtcattttcgggaacttgtccaccgagaacacttccagcagctcgccacgcaggcgcgcttcgagctggcgttcggccagttcgttgatgtcgatcgcgccctggctggtccaggccacgttcggcaactgcgggaacacaccggccaggctcaggccgtggggcttgaccaggcggtgggacaacaggtgcagcttgaggtaggcctcaggcgtggaggtcagtgcggcgtcttcggccagcagggtggcaaccagcggggtgtggctttcagccaggcggttgagcagcgcggcttgggtggcgtcgacattcttgagggcatcggccagttgcagcgcttggctgatggtgaaggtgatggcctggttgccttcggtgtaaccgaggatcggcgcgatggccgcgacgatttcagccgatgggttgagcagcggttgcgcgtaaaacacttccagccaagcaccttggcggttctgagtgccgacgccgaagcccaggctgaacagggaattggacatgctgttacctctacaaaaatggaaagggctggcctacttgagggccgccgaataactatctggcttgaagccaatcagggttctgtcaccgagatcaagcaccgggcgcttgatcatcgaaggttgtgcgagcatcaattcaatggctttcgactgatcgagatcggctttgcgttcgtcttcgagtttgcgaaaggtggtgcccgcacggttcaaaaccacctgccaaccgtgctcgttgcaccattgggtcaagtgttcgcggtcgataccggccgttttgtagtcgtggaactcatagcccacgccgtgctcatcgagccaggtgcgcgcttttttcatggtgtcgcaggctttgatgccgaaaaggtgcaacgttttgcttgaagcggtcaaggaattgcccccctttggaccaagtagaaattaaaggtcacggattatgccacgaccagcgggaccgtgcccctcgtcatgctggcgtgcgacttatgtgcaaaggccggtcggcagcataggcggttaacatagccgggcaatatggcacttcaacggccagttgttgcctgatgtgtgtcgttgcaagtcgattgtccgggaaacccgcgttatgcaaaccgcctataccgttcttatcctgctgatgctggtcagcgtttcgcgtctggttgggcgtgtcattcctctgccgttgcccctggtgcagatcgccgccggtgccctgctggcctggccgacgctgggcctgcacgtggcgctggacccggagttgttcctgtttctgttcctgccgccgctgctgttttcggatggctggcgcatgcccaagcgtgagttgtggcggttgcgtgggccgatcctgacgttggcggtggggttggtgttgttcacggtggtcggtgctggttatttcattcactggatattgcctacgatcccgctgccggtggccttcgccttggcagccgttttgtcgccgacggatgccgtggcggtgtcggcgatttcccagaaccgtctgcctacgcccttgatgcatatgctgcagggcgaggccctgatgaacgatgcgtcgggcctggtgacgttcaagtttgccctggcggcggcgttgaccggggtgttttccctggcggatgccagcctgacctttgtgttggtcgctgtcggtggcttggctgttggcgtagccctgagctggctggtcggccgactgcgcgcctggatgatcgcccgtggctgggatgacccggcaacccacgtggtgttcatgttgttgctgccatttgccgcctacgtgctggcggagcgcctgggcgcctcgggcatcttgtcggcggtcgccgcgggcatgatgcaaagctggcttgacctgctgccacgccagaccagcacacgcttgctcaatcgcagtgtctggtcgctgttggagtttgccttcaacggcctgatcttcctgctgctgggcctgcaactgccggacatcatcaaggccgtggtcagccacgagacaacgctatggccgaccctgttttatcgctgcctggatgtgatcgcgatcttcctggtgttggtggtgctgcgttttatctgggtgcagagcatctggcggctgtcaggcctgttacgccgaattcgtgggaaaagcgagctgacgctggtgccgaccgcccgttcctgctggttgttgactgtgggtggtgtgcgcggtgcggtgacgttggccggtgtcatgtcggtgcctttgctgctggcgccgggccaggactttcccgagcgcgacctgctgatcttcatcgcggcaggcgtgatcctcctgtcgctgatcgctgcctgtatcgccttgccgttgttgttacgtggcattgaaaagagcccggacgagaaacgtcacaaagaggtccgcgaggcctggaaaaaaacggctgtggctgcgatccatgcgctggaagcagaagaacccgctgagcccgaaagccaggacgccgcccaggcggcacttgccactgagctcaaggcacggctgatgtcggaatatcgccatcaattggaggtgttcaacgactcggccgaggcccaggtgctggcgcagcagatggacctgcttgagcgcaaactgcggctcaaggcgctgcgggcgcagcgcctggagttatatagcctgagtcgtcatcaccagattggtgatgacgtgttgagggaggtgttggcggatctggacatgagtgaggcgaatctggggcaggtgaaatgaccaccaagccctttagcggcgacgctgaataaaatcgcgaatgcgttcagccgcttccacacattccgccagcggtgcaaccaacgccatgcgcacgcgcccggcaccggggttgaaaccatccacttcccgcgacagatacgagcccggcaccacggttacatgttcttccacgaacaagtcgcggcagaacgcggcgtcgtcgccattcacattcggccacaggtagaagccgccgtccgggctctgcacatccagcactggcttgagaatcgccagcaccgcgtcgaatttctcgcgatacaggtcacggttggccagcacgtgggcttcatcctgccaggcggcaatgcttgccaactgggtctgcaccggcatcgcgcagccgtggtaggtgcggtacagcaggaacgccttgaggatgtcagcgtcgccggccacaaagcctgagcgcaggcccggaaggttggagcgcttggacaggctgtggaacaccacacaacgcttgaagtcctgacgccccagttcgacgcaggcgctcagcaggcccggcggcggggtttgttcgtcgaagtacagctcgctgtagcactcgtcggcggcgatgacgaagtcatattcgtcggccagggcgatgagttttttcagcgtttcgaccgggatcagcgcgccggtcgggttgccgggggagcacaggaacaggatctggcaacgcttccagatgtccggggtcacggcgtcgaagtccgggttgaagccattggcgtccaggcatggcaggtagtgcggcttggccccggccaggaacgcggcgccttcgtagatctggtagaacgggttcgggctcaccaccagcgcgtcgtcgccacggttgaccacggtctgggtgaaggcgaacagcgcttcacgggtgccattgaccggcaggatattgcgcgccgggtcgagccagcccttgggtacgttgaaacggcgttcgcaccaggcgccgatggcctcacgcagcgccgggatgcccagggtggtcgggtagaccgccatctggtcgagattatcggccagggccttggccacgaattccggggatttgtgcttgggttcgccgatggacagcgcaatcgggcgcttgtccgggtttggcgtgacgctgccgagcagggcgcgcagtttctcgaacgggtagggctgtagctggttcagggcgttgttcatggaaatctcgttcaattcggttgaaagcatgcggtctgctgggcgcagcgattcttatgtgggagggggcttgcccccgattgctgactgtcagttgaaatattcgtagctgacccaccgctatcgggggcaagccccctcccacacaagccctgcttcacagattaatccgcgtattcaaatagtcaggcgcgtgagttcgacgccgggctcctgggtcacgctcaactgctggacgatggcttcctgcaaacgcaggcacagctcagggtcggacagcggctgattgtcggcatcggtaatgaagaacacgtcctccacccgctcgccgagggtcgcaatcttggcgttctgcaacgacaggtcgaactccaggaagatcccgccgatgcgtgccagcaggcctgggcgatccggagcgctgagttccagtactgtgaccggccgttgggcgtcgttggaaatggtgacctggggtgcaaacgcaaagtgcttgagctggcgcggcacccggcgctggatgatggtcgggtagtcgtcagggttacgcagggcctcggtcaggccttcgcggatcttcttcacgcgcgccgggttgtcgccaatcgagtcgccatcggtgtcgagcacgatataggtgtcgagggtgaactggctgctggaggtgatcacccgggcgtcatggatgttcaggttgagctggtccatggcggccacggttacggcgaagaagtcgtgctggtccggcgcgtagatgaagatctgcgtgccgccttcgaattcgcgttgggtggtttccttgatcagcaccaacgggccgccatcggccggttgctgcaggatcgcgtcggtatgccaggccacatcaccggcggtgtgacgcaggaagtaatcgtcgcccagttgcgaccacagttgctcgacatcgtccgggtcgttgccgccgcgcaccaggatatccagggctgcgctctgtgtgcgccgaatctgctcttcgcggtccaccgggttttccaggccacggcgcagggcacgcttggtctcggtgtacagctggcgcagcaggctggcgcgccacgagttccacagcgtcgggttggtcgcgttgatatccgagacggtcagcacgtacaggtagtcgagacgggtttcatcaccgacgatctgtgcgaagtcgtggatcacctgcgggtcggacaagtccttgcgctgggcggtcgtcgacatcaccaggtggttctgcaccagccagacgatcaggcggctgtcccacagtggcaactggtggcgctggcagaaggcttcggcatcaaccgcaccgacctcggagtggtcgccgtgcctgcccttgccgatgtcgtggtaaagaccggccaggtagatcaactcgggcttgggcagcttggccatcaatttactggccagcggaaatttctccgacacctgggtgtactgcaacttacgcaggtgcttgatcaggttcagggtgtgggcgtccacggtatagatgtggaacaagtcgtgctgcatctgcccgacgataaaaccgaattccggcaggtagcgcccgaggatgccgtaacggttcatgcgccgcaggttgcggtggatgccgatcttgcacttgaacagctcgatgaacaggctggtgttgcggatatcgttgcggaagtcgtcgtcgatcaggtgccggttttcccgcagcaggcgaatggtgtcggcgcgcacgcctttgatttccggctgttgggccatcagcacgaagatttccagcatggcgaacggcgtgcgacggaacacgttgtcgttgcgcgcctcgatatagccgtcgtgcagttggaagcgtgcattgatcggttgtggcggcgcttcgtcttcaggggccaggatcacttcttcgaaatgctggatgatcaggtcgctgagctgggcaatgctcatgaccacacggtaatactgctgcatgaagctttcgatgctggtcttcgcgtcttcgccttcaaaacccagcagggtggcgatggagcgctggtggtcgaacagcaggcggtcttcggaacgcccggccagcatgtgcagggcgtagcgcaccttccagaggaattcctgggatgaagccagcagggcgttttcgctttctaccaggaagccttcgccggccagggcgcgcaggttcagggtgccgtactggcgacgcgcaacccacagaatcgtctggatatcccgcagcccgcccggcgagcctttgacgttgggttccaggttgtattcggtgtcgttgtacttgtggtgccgggccttttgctcggcgcgcttggccaggaagaagtccttgctcggccacatgtgtgcggtgctggtgacttcgagcatgcgctggcgcaggcgctcggggccggcgatggtgcggctttccatcaggttggtgatcacggtgaggtcggcgcgcgcctcttcggcgcattcgtccaccgagcgcacgctttggccgacttccagtccgatgtcccacaacagcgtcagaaaacgctcgatggaatcgcgaaagatctcatggtcggcgctgtccagcaggatcagcaggtcgatatcggagtagggatgcagctcgccgcgcccgtagccgccgacagccaccagggcgatgtctgcgtcttcgctccaactgaactgttcccaggccttttgcagaatgttatcgacaaaccaggcccggtcctcgatcagccggcggatgtcccgaccactgcgaaagcgcgcgtcgagtacctcgcgggcctggcggatagccttcttgaacgcggcgatggggctcgccttcagggccagttcggcctggaactggccacggtcgaagagttcgggatccacctggggcatcgatcggctttcctttctatctattcagtcagtcacaacacagtgggggaaaaccaaagcaacctttaggccgaaacgcgtgggatcgtgtcgtcagcgcgcagggtaaagatctcgtagccggtttcggtgaccagcaaggtgtgttcccactgggccgagagcttgcggtccttggtgatggcggtccagccgtcgcccagtaccttggtgtcggccttgccctggttgatcattggttcgatggtgaaggtcatgcctgccttcagttccataccggtgccggcgcggccgtagtgcaggatctgcggctcttcgtggaagacggtgccgataccgtggccgcagaattcgcgtaccaccgagaagccgttcttttcagcgtgcttctggatcacttcgccgatgtcgcccaggcggcagccgggcttgacgatctcgatggccttgtacatgcattcctgggtgacctgggacaggcgctcggcccagaccggtacgttaccgacgtggaacatacggctggtatcgccaaagtagcggtctttgatcacggtgacatcgatgttcaaggtgtcgccatccttcaacggcttgtcgcccggaatgccgtggcagaccacgtggttgaccgaggtgcagatcgacttggggaagcccttgtagttcagcggcgcagggatggcgccctgcacgttgacgatatagtcgtggcagatctggttgagggtctcggtggtgacgccgggcttgacgtgttcggcaatcatttccagcacgtcggcagccagtttgccggcgatgcgcatgccagcgatgtcttcggcggttttcaagctaacggtcatacaggctctctctagcgcgacgcgctgaaatcaatacggtttacgggcgtgcgacaaaaggttgcagaattcgcacaagccacagaaaacgcgattctaacagaccatggcgtcaaatcatgagcctctgatgatcgcttctgtctataaggtagggctatgtcggctctattcaaggggttacacgaaggcgcgctacggcaaatgtgattgcgtgttccgtttttgccgatgctgtggtataaaatgcgccgctttccggggataccccgcaaagcttaaatccacacacgtgtcgacacgatgacctgggtgccggaggccttgatgccgctggttggtcattgggatacgtggaggccaaacccgacttattaaggaactatcatgtcccaagtcaacatgcgcgatatgctgaaggccggtgtgcacttcggtcaccagacccgttactggaacccgaaaatgggtaagtacattttcggcgcgcgtaacaagatccacatcatcaaccttgaaaaaaccctgccaatgttcaacgaagcgctgactttcgtagagcgcctggcccagggcaaaaacaagattctgttcgtcggcaccaagcgttccgctggcaagatcgttgctgaagaagcagcacgttgcggttcgccgtacgtcgatcaccgctggttgggcggcatgctgaccaacttcaaaaccatccgtgcttccatcaagcgtctgcgtgaccttgaagtgcaagccgaagacggtactttcgccaagctgaccaagaaagaagcgctgatgcgctcccgtgacctggaaaagctcgatcgttccctgggtggtatcaaggacatgggcggtctgcctgacgcactgttcgttatcgacgttgatcacgagcgcatcgcgatcaccgaagccaacaagctgggcatccctgttatcggcgtagtcgataccaacagcagcccggaaggcgttgactacatcatcccaggcaacgatgacgcaatccgcgctatccagctgtacatgggttcgatggctgacgctgtgatccgtggtcgcaaccacgttgctggcggtaccgagcagttcgttgaagaagctccggtagctgccgctgagtaattagcgccctggcgttgactcagtaagcaaaaagggggcttggccccctttttgccacctcgaaaaccatttgtcggcagcgcagctacatcatctgtaacgtgcagcggcctacaagggagattcgggaagaattgatcgcccgtttgatcgggtggaatggttgaaaacctatccaagaggattttgaaatggcagagattactgcagcgttggttaaagaactgcgtgagcgtaccggcgaaggcatgatggattgcaaaaaggccttgaccaaggccggcggcgacatcgaaaaagccatcgacgacatgcgtgcctccggcgccatcaaggccgccaagaaagctggcaacgtcgctgctgaaggcgctatcgctctggttgaagacggtaaagccgccgttctgctggaagtgaactcgcagaccgacttcctggccctgcaagatgacttcaaggcattcgttgctgccagcgtcaagaaagcattcgatgagaagctgactaccgttgagcctctgatcgaagcccaagaagctgatcgcctggttctggttggcaaggttggcgaaaacgtcaacatccgtcgcctgactcgcgttgaaggtgatgtggttggtggttacctgcacggcaacaagatcggtgtagctgttgttctgaaaggcggcgacgttgagctggccaaagacatcgctatgcacgttgctgccagcaaccctgagttcctgctgccttcggaagtgtctgccgaagcgatcgagcgtgaaaaagctgtgttcctgagcctgaacgccgacaagatcgccggcaagccagagaacatcgttgaaaacatgatcaaaggccgtatcagcaagttcctggctgaagcgagcctggttgagcaggcgttcgtcaagaaccctgaaatcaaggttggcgaactggccaagaaagccggtgctgaaatcgtttccttcacctactacaaagtaggcgaaggcatcgagaagccggtcgacaacttcgctgaagaagttgctgcccagctggctgccgccaagcaataagacagttttcaactgtcgcccgaaagaggctgcccgctcacgcgcgcagcctcttttcaaatgggaaggctgattttaattggcttcctttcggaactggcttacaaagccgtgttccgatggcgctgtgacagcgtccagctagagtgaacgcaagccgtaaacggctcgccaagaatttttaaaatacgccgcaggagagattcgcaatggctcagcagggcagtggttatcaggctcgctataaacgcattctactcaagcttagcggcgaggccctgatgggctcggaagagttcgggatcgatcccaaggtgcttgaccgcatggcgctggaagtcggccagttggtcggcatcggcgtgcaggttggcctggtgatcggtggtggcaacctgttccgcggcgcggcactgagtgctgcaggcatggatcgggtcaccggcgaccacatgggcatgctggccactgtgatgaacgccctggccatgcgcgacgccctggagcgtgccaatatctcggctatcgtgatgtcggctatttccatggtcggcgtgaccgatcactatgatcgccgcaaagccatgcgccacctgaactccaaggaagtggtgatcttcgcggccggcacgggtaacccgttctttaccaccgattcggcagcctgcctgcgcgccatcgagatcgatgcggacgtggtgctcaaggcgaccaaggtggatggcgtgtacaccgcagacccgttcaaagacccgcatgccgagaagttcgatcatctgacctacgatgaagtgctggatcgcaagctgggcgtgatggacctgacggctatttgcctgtgccgcgaccacaagatgccactgcgcgtatttaacatgaacaagcccggcgccctgctgaatatcgtacacggcggcgcagaagggactctgatcgaggaaggccaacaatgatcaacgaaatcaagaaagacgcccaagcgcgtatgcagaaatccctggagtctctgagccatgcattcggccagattcgtaccggcaaggcgcacccgagcatcctgggcagcgtgatggtgccttactacggctctgatacgcctatcagcagcgttgccaacattaccgttaaagactcgcgcaccctgcaagtcgtagcctttgagcgcaacatgctgggtgctgtcgacaaggccatccagagcgccggtttgaacctcaacccgaccaacctgggtgagttgctgctgatctccatgccggccttgactgaagagacccgcaagggcttcaccaagcaggctcgcagcgctgcagaagacgcgcgtgttgctgtacgtaatatccgtcgcgatgccttgggtgacctgaagaagctggtcaaggacaaggaaatcagtgaagacgaagagcgtcgtgccaccgccgatatcgacaagttgaccaaggatgccgaggcccagatcaccaaggccacggaagaaaaagaaaaggacctgatggccgtataaggggtcaggacgccttcatggaaaagaccaagcagactgtgccctccgtggtgccgcgccatgtcgcgatcatcatggatgggaataatcgctgggcgaagaagcgctttatgccgggtgtcgccgggcataaagcgggtgtcgatgcggtaagggctgtgatcgaggtgtgtgccgaggccaaggtcgaagtgttgaccctgtttgcgttctccagtgagaactggcagcggcccgccgaagaagtcagtgccttgatggatctgttcttcaaggccctgcgtcgtgaggccaagcgccttaacgacaacaacatcagcttgcgcatcattggcgaccgctcgcgtttccacccggaacttcaagctgccatgcgtgaggctgaggcgatcacggctggcgccaaccgttttgtgctacagatcgcagccaactacggcggccagtgggatatcgcccaggcagcgcagcggctggctcgtgaagtgcaggccggccatctgcgcccagacgacatcacgcctgaactgttgcaaacctgcctggtgaccggtgacctgccgttgccggacctgtgcatccgcaccggtggtgagcaccgcatcagtaatttcctgctgtggcagctggcctataccgagctgtacttctccgacctgttctggccggacttcaaacacgatgccatgcgtaatgcactggccgatttcgcttcccgtcagcgtcgcttcggtaaaacgagcgagcagatcgaagctggagcccgggtttaaatgcttaaacaacgaatcatcacggcactgatcctgttgccgattgccctgtgcgggtttttcctgctcgacggctccggctttgcgctgtttatcggcctggttgtcaccctgggtgcctgggaatgggcgcgcctggcggggttcagtgcgcagctcccacgcgtggtgtatgccgctgtcgtggctgccttggcgtttctcttgtacatcctgccggacctcgcgccctgggtgttgggggcggcagtgttgtggtgggcgctggcgacgttcctggtactgacctatccgcgcaccagcggtcaatggaccagtgttgcctgcaagctggtgattggcttgctgatcctgctgccggcttggcaagggctggtggagatcaagcgttatccaatgggtaactggttgatcctggcagtcatggtgctggtgtggggggctgatattggtgcctacttctccggtcgggctttcggcaagcgcaagttggcgccggcggtcagtccgggcaagagctgggaaggtgtctatggtggtttggcgttgacgctgatgatcgcgctggtcgtcggtgtggtgcgcggttgggcggcgaaggaaatcttcctggcgctgctggccacggccattgtcgtgcttgtttcggtggtgggcgacctcactgaaagcatgttcaagcgtcaggcgggtatcaaggacagcagtaacctgctgcccggtcacggtggtgtattggatcgtatcgacagcctgacggcggccatcccgatcttcgcagtgctgctatggatgactgcttcgtgagccgccttcaacaagtgaccgtgctgggtgcaaccggctcggttgggctgagcaccctggatgtaattgcgcgtcatcctgatcgctatcaggtctttgcccttactgggtttagccgcctgagcgagctgttggccttgtgcgtgcgccacgcaccgcgcttcgtcgtagtgcctgaggcaggagcggcgcgtggcttgcaggatgatctgcgggctgctgggctggcgactcgagtgttggtgggcgaggaggggttgtgtcaggtctcggctgacgccgaggtggataccgtggtcgccgctatcgtcggtgccgccggcctgcgtccaaccctcgccgctgtagatgccggcaagaagatcctgctggccaacaaagaagcgctggtcatgtctggcgcgctcttcatgcaggcggtgcgcaaaagcggcgccgtgctgctgccgctcgacagcgagcacaacgcgatcttccaatgcatgcccggcgactatgcgcgtggcttgagccaggttggcgtgcgtcggatcctgctgaccgcctccggtggtccgttccggcaaactcctctggccgagcttgagcatgtttcgcccgaccaggcgtgcgctcatccgaactggtccatggggcgtaagatctcggtggattcggcgagcatgatgaacaagggcctggagctgatcgaggcgtgctggttgttcgatgcacggccggatcaggtcgaagtggtgattcacccgcaaagtgtgatccattccctggtcgactatgtagacggttcggtcctggcccagttgggcaaccccgatatgcgcacgccgatcgccaatgccttggcctggccggagcggattgattccggtgtcgccccgctggatctgtttgcagtggcccgcctggacttcgaggcgccggatgagcagcgctttccttgcctgcgcctggcccggcaagcggccgaagcgggtaacagtgcgccggcaatgctgaatgcggccaacgaagtggctgtggcggcgtttctcgaacggcgcatccgctttccgcagatcgcgagtatcatcgaggacgtcctggcgcttgagcctgtcgtggcggtgaatgacctggcggcggtattcgaagccgataccaaggctcgcgccctggcagagcaatggttgagctgcaacgcgcgttagtctgtgggcgggttcgagccttcaggcactggattggaatgcggagaaattagatgagtgcgctttacatgattgtcggcaccctggttgctctgggtgtgctggttaccttccacgaattcggtcacttctgggtggcacgtcgttgcggcgtcaaggtattgcgcttttccgtcggcttcggcatgccgctgttgcgctggcacgaccgccgtggcacggagttcgtgatcgcggccatcccattgggtggctacgtcaagatgctcgatgagcgtgaaggcgaggtgccggcagaccagttggatcaatccttcaatcgcaagaccgttcgtcagcgtatcgccattgttgctgcaggtccgatcgccaacttcctgttggcgatggtgttcttctgggtattggccatgctgggcagccagcaggtgcggccggtgatcggtgcagttgaggcggacagcattgccgccaaggcagggctggttgctggacaagaaattgtttccattgatggcgaacccaccacaggttggggtgcagtcaatttgcagttggtgcgtcgcctgggtgaaagcggcaccgtgaatgtagtggtgcgcgagcaggactccacggccgagagcccgcgtgagctggctctcgaccactggctcaagggcgctgatgagcctgatccgatcaaatccctgggcatacgtccatggcgtccggccttgccgccggtgcttgccgagctggatccgaaaggtccggcccaggctgcgggcctgaaaaccggcgatcgcctgctggctctcgatggtcagccactgggtgactggcaacaggtggtcgatctggttcgtgtacgccctgataccaaaattgtgctgaaagttgaacgcgacggtgctcaaatcgacgtccctgtgaccttgtcggttcgcggggaagccaaggcggccgggggttacctgggcgccggagtcaaaggtgtcgattggccgccatcgatggtacgtgaggtgagtttcgggccgttggcggcaattggcgagggtgcgaaacgcacctggaccatgagtgtactgacgctcgaatccctcaagaaaatgttgttcggcgagctctcggtaaaaaacttgagtggaccgataaccattgctaaagtggcgggcgcttctgcccagtcgggtgtcgcggatttcctgaatttcctggcttatctgagtattagcctgggggttctgaatttgctgcccattccagtattggatggggggcatctgttgttttatctggtcgagtgggtgcgtggtcgccccttgtcggatcgggtgcagggttgggggatacagatcggtatcagtttggtggtcggggtgatgttgttagccctggtcaacgatctgggtcgactgtaacgcttcgctgaattgcgaatctgccgcattttgcggcagtttgtttattgccagttggaataagaaaggacttcatgaaacgtctgctgctaactgcggttctcaccgtattgatgatcgccgaagttcacgccgagtccttcaccatctccgatattcgcgtcaacggcctccagcgggtttccgcgggtagcgtctttggtgccttgccgttgaacgttggggaacaggctgatgaccgtcgcctggtggaatccactcgtgcgctgttcaaaaccggtttctttcaagacatccaactgggtcgcgaaggcaacgtcctggtcatcactgtggtcgagcgaccttccgtcgccagtatcgagatcgaaggcaacaaggcgatctcgactgaagacttgatgaagggtctgaagcaatccggcctggccgaaggcgagatcttccaacgcgccaccctcgaaggtgtgcgtaacgagctgcaacgccagtacgttgcccagggccgctactccgcgaccgtggaaacggaagtggtgccgcagccgcgcaaccgtgtcggcctcaaggtcaacatcaacgaaggcactgtggcggcgatccagcacatcaacgtggtaggcaataccaagttctctgatgacgacctgatcgacctgttcgaactcaagaccaccaactggctgtcgttcttcaagaacgatgacaagtacgcccgtgaaaaactgtccggtgacctggaacgtctgcgttcctactacctggaccgtggctatatcaatatggatatcgcttcgacccaggtgtccatcaccccggacaagaagcacgtctacatcaccgtcaacgtcaacgaaggcgagaagtacaaggttcgcgacgtcaagctgagcggcgacctgaaagtgcctgaagaccaggtcaaggcgctgttgctggtgcagaaagaccaggtgttctcgcgcaagctgatgaccaccacgtccgaactgatcacccgtcgcctgggcaacgaaggctacaccttcgccaacgtcaacggtgtgccgacgccccatgatgatgaccacaccgtggacatcaccttcgtggtcgatccaggcaagcgtgcctacgtgaaccgtatcaacttccgtggcaacaccaagtctgcggacgaagtgctgcgtcgtgaaatgcgtcagatggaaggcggctgggcctcgacttacctgatcgaccagtccaagacccgtcttgagcgcctcggcttcttcaaggaagtcaacgtcgaaaccccggccgtaccgggtgtggatgaccaggttgacgtgaactacgccgtggaagaacaagcatcgggttccatcaccgccagcgtcggtttcgcacagagcgccggcctgatcctcggcggttcgatcacccagaacaacttcctgggtactggtaaccgagtttccatcggcctgacccgaagcgaataccagagccgatataacttcggttataccgacccctactggactgctgacggtgtgagcctgggctacaacgccttctatcgcaccactgactacaaagacctcgacgttgacgtagccagctatgcaatcgacagccttggtgctggcgtgaacgtgggttacccgatcagcgagacctcgcgtctgacgttcggcttgaccgcgcagcaggatgagatcaagaccggtgtctacaccgtggacgaaatcttcgacttcacccgtcgtgaaggtgacaagttcctgaacttcaaggcgtccgccggctggtccgagtcgaccctgaacaaaggtgtactggcgacccgtggtcattcccagagcctgaccctggaaaccaccacgccgggcagcgacctgtcgttcttcaagctcgactaccgcggccagctgttccagccgttgagcgacaactacaccatgcgcctgcacactgagctgggttatggcgatggttatggttccaccaatggtctaccgttctacgagaactactatgcgggtggcttcaactccgtacgtggtttcaaggacagcaccctgggcccgcgtggtactccgagccgtggtgttggtgtaaccggtaaccagggcaccgtagcggactccgacaacgacccactgccgttcggtggtaacgtcctgatccagggtggtgcggaaatcctgttcccgctgccgttcgtgaaagatcagcgctccctgcgtacttcggtattctgggacgtgggtaacgtgttcgactccaaatgcgagcagatccgtaacccgagcggcgtgaagtccaacactcagtgtaacgacgtgagcctgagtaacctggcaagctccgtgggtgtgggtgtgacctgggtgactgcgcttggcccattgagctttgctctggccatgccgatcaagaaaccggataacgctgaaacccagattttccaattctccctcggccagacgttctaagcgtctgacccaagataacgacaacggattctgtaggagtacatcgtgcgtaagttgactcaattggtgctgctggcaaccgtgctggtaaccaccccggccttcgccgaaatgaaaattgccgtcctgaactatcagatggccctgctggaatccgatgcggccaagaaatacgccgtggatgccgagaaaaaattcggtccgcaactgaccaagctcaagaccctggaaagcagcgccaagggcatccaggatcgtctggtagccggtggtgacaagatgcagcaaggcgagcgcgagcgtctggagcttgaattcaagcaaaaggcccgtgactaccagttccagtccaaggagctgaacgaagccaaggctgtagctgaccgtgaaatgctgaagcagctgaagccgaaactcgacagcgctgtggaagaggtcatcaagaagggtgcctttgacctggtgttcgagcgtggcgctgtgatcgacgtcaagcctcaatacgacatcacccgtcaggtgatcgagcgcatgaaccagctgaagtaagccatgaccgcgactatcaagctcggcgagttggccgagttcctgggggccaccttgcgtggctccccggagaaggaaatcactgggctagccaccttgcaggaggctggcccagctcagttgagcttcctcgcaaacccccaataccgtaaatacctggtcgacagccaagccgcagccgttttgctgaaggccgccgatgccgaagggtttgtcggggatgcgctggtggtggccgacccgtacctggcgtatgcgcgggtgtcgcacctgttcgatccgaaacccaaggccgccagcggtattcacccatctgcggtgatcgccgatgatgcccaggttgacgccgcagccagcatcggtgcctttgcggtgatcgagagcggtgcgcgcattgcggcggatgtgaccataggtgctcattgctttatcggtgcgcgctgcgaaatcggcgcaggcggttggctggcaccccgtgtaaccctgtaccacgacgtgcgtattggtgagcgtgtggtcatccagtcgggtgccgtgataggcggtgaaggctttggctttgccaattccaagggtatctggaacaagattgcccaggtcggcggcgtattgatcggcgacgacgtggaaattggtgtgaacacggctgtcgatcgcggggccctggccgacaccgtgatcggcaacggcgtgaagctcgacaaccagatccagatcgcccacaacgtacagattggcgatcacaccgccatggcagcctgtgtgggcatctccggcagcacccggatcggcaagcattgcatgctcgccggtggcgtcgggctggtggggcacatcgatatttgcgacaacgttttcatcaccggcatgaccatggtcacccactctattaccgagcctggggcctattcttccggtaccgccatgcagcccgcagctgaatggcgcaagagtgcagcacggttgaggcagctcgacgacatggctcgacgtctcaaacagctggaaaagcgtgttggggacgtgacccctggcggtaatgcttcatcagaaggctgataccatttccatatcaagtgtgcacagccgctagactgcctccttgatttgctagcggggcgtgcttttagttcgcccgcccccaatctttattacaggcttccccccgaaatgatggacatcaacgagattcgcgaatacctgcctcaccgttacccgttcctgctggtggatcgcgtagtggacctcaatgtcgaggaaaagcgcattcgtgcctacaagaatgtcagcatcaacgaaccgttcttcaatggtcactttcctgcgcatccgatcatgccgggtgtgttgatcatcgaggcgatggcccaggctgccggtatccttggtttcaaaatgctcgacctcaagcctgccgatggcacgctttactatttcgtgggctccgacaagttgcgtttccgcaacccggttactccgggtgaccagttgatcctggaagccaagttcatcagctgcaagcgccagatctggaagttcgaatgccaggcctcggtggatggcaagccggtgtgctctgccgagatcatctgtgcggaacgcaaactatgagtttgattgaccctcgcgcaatcatcgatccgtcggccgttctggccgccgacgttgaggtcggcccctggtcgatcatcggcgcaggtgtggaaatcggcgaggggactgtcatcgggccgcacgtgatcctcaaaggtccgacccgcattggcaaacacaatcgcatctaccagttctcctcggtaggcgaagacaccccggacatgaagtacaagggtgaagagacccgcctggtaatcggtgatcacaacatcatccgtgaaggcgtgaccattcatcgtggtaccgtgcaggatcgggctgaaaccaccctgggcgaccacaacctggtcatggcctacgctcatatcggtcacgacagcgtgatcggcaaccactgcatcctggtcaacaacaccgcgttggccggccatgtgcatgttgacgattgggcaatcctgtccgggttcaccctggttcatcagtactgccatatcggtgctcatagcttctccggcatgggcaccgccattggcaaggatgttccggcattcgtcacggtattcggcaaccccgccgaagcccgcagcatgaacttcgaaggcatgcgccgtcggggtttcagcgaagaagccatccacgccctgcgccgcgcctacaaggtggtttaccgccaggggctcacggtggaacaggcgttgacccaactgaccgagccggcagcgttgttcccggaagtcgcggtgttccgtgactcgatccaggcgtcgactcgcggcatcacccgctgatcatggctaatctgcgtatcgcgctggtggccggggaagcttccggcgacattctgggcgccggtcttatgcgggccctcaaagcccagcatcctgcggtggagttcatcggtgttggtggcccgctgatgcaggctgaggggcttacgtcctacttccccatggagcgtttgtcggtcatggggttggtcgaggtgctgggtcgcctgcgcgagctgctggcccgccgcaagttgctgatccagaccctgatcgaagaaaagcctgacgtctttatcggaatcgacgcgccggacttcaccctcaatatcgaactcaagttgcgccaggccggcatcaagacggtgcactatgtcagcccgtccgtctgggcgtggcggcagaagcgtgtgctcaagatccgcgaaggctgcgacctgatgctgacgttgctgccgttcgaagcgcggttctatgaagaaaagggcgtgccggtgcggtttgtcgggcacaccctggccgacactattcccttgcaggcggatcgcgcggccgcgcgtgccgagttgggcttgcccgacggccccttggttgcgttgatgccgggcagccgtggcggcgaagtcggtcgcctggcctcggtgtttttcgacgctgccgagcgtctgcaggccctgaagccaggcgtacgtttcgtgttgccctgcgccagcccgcaacgtcgtgcgcagatcgagacattgctggaagggcgcaacctgccgttgactctgctcgatggtcaatcgcacctggccctggcggcctgtgatgcggtgctgatcgcctcggggacggccacgctggaggccctgctgtacaagcgcccgatggtggtggcctaccgcctggcgccgctgacgttctggattctcaagcgcatggtcaaaagtccttacatctccctgcccaatctgctggcccagcgcctgttggtgccggagttgttgcaggacgatgcaacgccagaggcgctcgcgcaaaccctgctccccttgatcgacggcggcgaagaacagacccgtggtttcgacgctatccatcgcatactgcgccgtgatgcctcgaaccaggcggcagacgctgtattgacgttgatcggccagaaacaggaggcgatatgagtgcgcaaatgggcctggatttcagcctggttgccgaagcccacgaactggtggccggtgttgacgaagtcgggcgcgggcccttgtgtggcgccgtggtcacggcggcagtgatcctcgatccaaaccgtccgatcctcggcctcaacgactcgaaaaaactcaccgaagcgcggcgcgaaaagctctacgacgagatttgcgagaaagccctgagttggcacatcgcccgggccgaagttgaagaaatcgatgaattgaacatcctccacgccaccatgctcgccatgcagcgtgcagtggagggcctgcacatcacgcccaagctggcgatgatcgatggcaaccgctgccccagactggccatgccatcggaggcggtggtgaagggtgatagcaaggtgccggcgattgcggcggcctccatcctggcaaaggtcagtcgtgatcgtgaaatggcggctttcgaattgatctacccgggctatggcatcggcggtcataaaggctacccgacgcccgttcatctggaagccctggcacgtcttggccctacaccgatccaccgccgctcgttcgccccggtgcgtcaggcttacgaggcgcgggagagtctcagcgaggtgtagtcgcgaggctgatgtttttgccaaggcccggtacaatccgggccttgttgtctccacgtttctagacaggatcactatgccggcttcattcgttcacctacgcctgcacactgaatactccctggtcgacggcctggtacggatcaaaccgctggtcaaaaccctggtgggcatgaacatgcctgcggtcgcggtcaccgatcagaacaacatgtgttccttggtcaagttctacaagaacgccatgggcgccggtatcaagccgatctgcggcgctgacctgtggctgtccaacaaagacccggataaccccctgagccgtatcagcctgctggcgatgaacggcgtgggttatcgcaaccttaccgaactgatctcccgtggtttcatcgatggccagcgcaatggttcgatcatcatcgagcgcgaatgggtcgccgaggccagcgaaggcctgatcatgctgtcggccgccaaagagggtgagatcggtatcgcgctgctggggggcaacccccaagaagccgaagtactggccaaggaatggatgcaggtcttccccgaccgtttctacctggaagtccagcgtaccaaccggcccaacgatgaagagcacctgcacgccgccgtggccctggccgacaagctgggcgcgccgctggtggcgactaacgatgtgcgcttcatcaagaaggaagacttcgaagcccacgaaacccgcgtgtgcatcggtgaaggccgggccctggatgacccgcgtcgttcgaaaaactacagcgaagagcagtacctcaaaagcgccgatgaaatggccgagctgttcagcgacctgcccgaggccctggaaaactccgtcgagatcgccaagcgctgcaatatcgaagtgaagctgggcaagcacttcctgcccaacttcccgattccggatggcatgaccatcgatgaatatttccgcaaggtgtccttcgacgggctggaagagcgccttagcgttctgctgcccaaggacaccaccgaagattacgaggccaagcgccaggtctatgtggaccggctgaatttcgagctggatatcatcatccagatggggttccccggttacttcctgatcgtgatggactttatccagtgggccaagaacaacggcgtgccggttggtccgggccgtgggtcaggtgccggttcgctggtggcctatgtgcaaaagatcaccgaccttgatccgttggaatatgacctgctgttcgaacgtttcctgaacccggaacgggtttccatgcccgacttcgacgtcgacttctgcatggatggccgtgaccgcgtgatcgaatacgtggccgagaaatacggccgcaacgcggtcagccagatcatcaccttcggttccatggcggcgaaagcggtaatccgcgacgtggctcgggtgcagggcaagtcctacggcctggcggatcgcctgtcgaagatgatcccgttcgaagtcggcatgaccctggaaaaggcctatgagcaggaagaaatcctgcgcgacttcatcaaggtcgatgaagaagcggccgagatctgggagatggcccgcaagcttgaaggcgtggtgcgtaacgtcggtaagcacgcgggtggcgtggtcatcgcgccgacaaagttgactgacttttcgccgatctattgcgatgaagaaggcgacggcctggtcacccagttcgacaaggatgacgtggaggcggccggcctggtgaagttcgacttcctcggcctgcggaccctgaccatcatcgactgggcgctcaagaccatcaaccgcgaccgcgccaaggtgggcgaagaaccgctggacatcgctttcatcccgctggacgacaagccgacctacaccctgctgcaaaaagccgaaaccacggcggtgttccagcttgaatcgcgcggcatgaaagagctgatcaaaaagctcaagcccgactgcctggaagacttgatcgcactggtggcgctattccgtccaggcccgctgcaatcgggcatggtggacgactttatcaaccgtaagcacgggcgcgccgagctggcctacccgcactcggactaccagtacgaaggcctcaagccggtattggcaccgacctacggcatcatcctgtatcaggaacaggtgatgcagattgcccaggtgatggccggttacaccctgggtggcgcggacatgctgcgtcgagccatgggtaagaaaaaacccgaggaaatggccaagcagcgcggcggtttcattgaaggctgcgcgaccaacaatatcgacgccgacctcgcgggtaacatcttcgacctggtggagaaattcgccggttacggcttcaacaaatcccactccgccgcctacggcctggtgtcgtaccagaccgcctggctgaaagcccactacccggcgccgttcatggctgcggtactttcggcggatatgcacaacaccgacaaggtcgtgaccttgatcgaggaagtgcgcaccatgaagctgcgcctcgacgcgccggacgtgaacgcttcggagttcaagttcacggtgaacgatgaaggccgcatcatctatggcctgggcgcgatcaagggcgtcggcgaggggccggtggaagccatcaccgaagcgcgccaggacggtccgttcaaagacttgttcgacttctgcgcacgggttgacctcaagcgcatcaacaaacgaaccctcgatggcctgatccgcagcggcgcgctcgaccgtctcggcccgtatttccatgatgagcccaaggcttatcaggccaatatcgaccgtaaccgcgcggtgctgctcaccgccatggaagaagcgatcaaggcggccgaacagactgcccgcacccatgacagcgggcatgccgacttgtttggcgggttgttcgtcgaagacgatgcagatgtgtacggtaaccaccgcaaggccaaggaactgaccctcaaggaacgcctcaagggcgagaaagataccttgggcctgtaccttaccggtcacccgattgacgagtacgaaggtgaaattcgccgcttcgcccgtcagcgcatcatcgacctgaaaccggcgcgggatacccagaccgttgcaggcatgatcatcgccctgcgggtgatgaagaacaagaagggcgacaagatgggttttatcaccctcgacgaccgctcgggccgcatcgaagcgtcgctgtttgccgacgcgttccactccgcccagtcgttgttgcagaccgatgccatggtggtcgtcgaaggggaggtcagcaacgatgacttctccggtggcctgcgcctgcggatcaagcgggtgatgagcatggaagatgcgcgcaccaatctggccgaaagcctgcgtttgaaggtgaaaaccgaagcgctcaagggcgatcagctacgctggttgggcgacctgctcaaacgccaccgtggtgcatgcccggtgaccatggagtacaccggcaatgacgccaaggccatgttgcagtttggcgagacctggcgaattgatcctgcggatggcttgattcaagctttgcgtgaccagttcgggcgagacaacgtcttcctccaataccgttgacggtcagatatgtctgacctcggctaaacatttaatctcgacctaaacgcgcctctcccttaaggtagggcgcgaatagacaaccggctggccaggcacgccctggccgtcgacccaagacggacgcttatgaacccgaattttcttgatttcgaacagccgatcgctgacctgcaagccaagatcgaagagctgcgcctggtcggcaatgacaattcgctgaatatcggcgatgaaatctcccgcctgcaagacaagagcaaaacgctcaccgaagacatcttcggcaagctgaccagctggcagatcgcgcgcctcgctcgccacccgcgccgtccttacaccctggactacattcagcacattttcaccgagttcgacgagctgcatggcgaccgccatttctccgacgacgccgccatcgtcggcggtatcgcccgcctggacgaccagccggtgatggtgatcggtcaccagaaaggccgtgaagtgcgcgagaaagtccgtcgcaacttcggcatgccgcgtccagagggctaccgcaaggcgtgccgcctgatggaaatggctgagcgcttcaagatgccgatcctgaccttcatcgacaccccgggcgcttatccggggatcgacgccgaagagcgcaaccagagcgaggctatcgcctggaacctgcgcgtcatggcccgcctgaaaaccccgatcatcgccaccgtcattggtgagggtggctccggtggtgcgctggccattggtgtctgtgaccagttgaacatgctgcaatactcgacctacgcggtgatctcgccggaaggttgcgcctcgatcctgtggaaaaccgccgaaaaggcaccggacgctgccgaagccatgggcattaccgctgatcgcctcaaaggcctgggtatcgtggataaagtgatcgccgagccattgggcggcgcccaccgtgacccggctgccgccgctgcgaccatccgcgccgaactgggctcgcaactggcgatgctcaagaagctggataacgaagcgctgctggcccgtcgttacgagcgtctgatgagctacggcctctaagacccacgcaatacccaaatgtgggagggggcttgcccctcccacatttgctttgtgtatgcttggtgggcgtattacagatcagaggcggtaacttgctatgaaaccggctctgcccgccagactcttgcaaaccctggccccctggcgcagcgccccggcctggcacattgcgttctccggcggccttgattccaccgtcctgctgcacctcctggccaacctggccaaaaccgagaccctgccccccctcagcgctgtccatgtccaccatggcctgcaggctgccgccgacgcgtggcccgctcattgccagtcgatctgtgacagcctgggcgtgcctttgcgcgttatgcgtgtgcaggtgcggcccggcgccagtcttgagcgtgccgcccgtgacgcgcgttaccaggcttttaccgaggtggccggggcagggcaggtagtgctgacgggccagcaccgcgatgatcaggctgaaaccctgttgtttcgactgctgcgtggggctggggtgcgtgggctggcagcgatgcccgtgcagcgtcgattggctggtggcgacttggtgcggccgctgttgaatgtctccagggcggagttggaagcctacgcccacacgcatcagctccaatggatcgaagacccttccaacgcagattcgcggttctcccgtaattacctgcgccaccgcgtgcttcctgcactgatggagcgttggccccaggccgtctcaagcctggcgcgcaccgccgaacacctgagtgaagcccagggcctgctcgatgagctggcgcagatggacctgcaggccgccgaccaaccgtccccctttccctggctgcctctaccgtccttggcccttgcaccgctgcgcgagctttccgatgcccgtcagcgcaacgccctacgtaattggctgacgccgctgacgcgcctgcccgacagcgaccactgggcaggttggcattccctgcgcgatgccaaggtcgatgcacagcccctgtggcgcctggccgacggcgagttgcaccgtagcggcgaacgcatctggtggctgcctatcgcatgctcggaattttctgacgcatcgctgagctggcccgatccgcaaaacccactagagttacccggcaatggccagttgacgttcaccggcaaggtgcccgaagggccgctggagatccgctaccgccagggcggcgaaatcatcgaagtacccggtcgcggccggcgtgacttgaagcgcctgcttaacgaaagtggcctgccgggcttcctccgtggcagattgccgctgctgtatcaaggcccgcagttgctgggcgcgcccagccttgcgggactgtggccgtcggcaagtgatggctggcaattacattggatgccacagacctgcgatcaaggtttgagctgatagcgcctttccggtagactacgctcccttcttgatacaacttctgtggattcgactgaatcgcagcagttgccgattaccaagcagtctttgctgggcgattccaaaaaatgtgtagcgatcaacgtaccggtgtttcattgctggtctgtcaccacgcggcggtttttttgaaaggtgcactgtgattaatgcaggtgatcgggggcttcggccttccttcgctttccccggcggctcggaccgctttaacgcagacttctagggtttttcatgacgcgctacatattcgtcacgggcggtgttgtttcttcattggggaaaggcattgcctccgcttcattggcggccatcctggaggcgcggggacttaaggtcaccatgctcaagcttgacccctacatcaacgttgacccgggcaccatgagcccgttccagcacggtgaagtgttcgtcacccacgacggcgccgagactgacctggacctgggccactacgagcggttcatccgcacgaccatgacccagaacaacaacttcaccaccggccgtgtctacgagcacgtgctgcgcaaggagcgccgtggtgactacctgggtgcaaccatccaggtgatcccgcacatcaccgacgaaatcaagcgccgcatcatcaagggtgccggcgatgccgacgtggcgatggtcgagatcggtggcaccgtgggtgacatcgaatcccaaccgttcctcgaagccatccgccagctgcgtttcgaagtcggcgccaagcgcgcgatgctgatgcacctgaccctggtcccgtacatcgccaccgccggcgagaccaaaaccaagcctacccagcactcggtcaaggaactgcgttccatcggcctgcagccggacgtgctggtgtgccgctccgatcacccgatcgacatttcctcgcgtcgcaagatcgcgcaattcaccaacgttgaagaacgtgcggtgatcgcgctggaagacgccgacaccatctacaagatcccgggcatcctgcattcgcaaggcctggatgactttgtggtcgagcgcttcggactgcaatgcaacggcgcagacctgtccgagtgggaagccgtggtcgacgccaagctcaaccctgagcacgaagtcaccatcgccatggtcggcaagtacatggaattgctggacgcgtacaagtcgctgatcgaagcgatgagccacgccggtatcagcaatcgtaccaaggtcaacctgcgctacatcgactccgaagacattgagaaccagggcaccgccctgctcgaaggtgtggacgcgatcctcgtgccaggcggtttcggcctgcgtggcgtggaaggcaagatcactgccgtgcagtacgcccgtgaaaacaaggtgccttacctgggtatctgcctgggcatgcaagtggccgttatcgagttcgcccgtaacgtgctgggctggaaagacgccaactccaccgagttcgacagcaagagcggtcacccggtcgtgggcctgatcaccgagtgggaagatgccaccggcgcggtcgagacccgtaccgaagcctccgacctgggcggcaccatgcgccttggcgcgcaggattgcctgctggaagccggctcgctggttcacgattgctacggcaaggacgtgatcgtcgagcgtcaccgtcaccgctacgaagtgaacaacaacctgctgccgcagattaaagaggccggcctgaaaatctccggtcgctccggtgatggcgcgctggttgaagtggtcgaggcaccggatcatccgtggttcgtcgcgtgccagttccaccctgagttcacctcgacgccgcgcgacggtcacccgttgttcagcggtttcgtcaaggcagccctgacgcaacaccagaagaaggcgtaaccctgatggcccagaagatcattcgcgtaggcgacatcgagattgccaacgacaagcccatggtgctgttcggcggcatgaacgtgctggaaagccgcgacatggcgatgcaggtctgtgaagagtacgtcaaggtcacccagaaactgggtatcccttacgtgttcaaggccagcttcgacaaggccaaccgttcgtccgtgacctcctatcgcggcccgggccttgaagaaggcatgcggatcttccaggacatcaagcaagccttcggcgtgccgatcatcaccgacgtccacgagcctgaacaggctgccgtggtcgccgaggtgtgcgacatcatccagttgccggccttcctgtcgcgccagaccgacctggtcgtcgcgatggccaagaccggcgccgtgatcaatatcaagaaagcccagtttctcgcaccccaggagatgaaacacatcctgaacaagtgcgtggaagcgggtaacgaccagttgatcctctgcgagcggggttcgagcttcggctataacaacctcgtggtggacatgctcggtttcggcatcatgaaacagttcgaatacccggtgttcttcgacgtgacccacgcgctgcaaatgcccggtggtcgcgccgattccgcgggcgggcgccgtgcccaggtgctggacctggccaaggcaggcatcagccagtccctggccggcctgttcctggaagcccacccggacccggacaacgccaaatgcgacggcccatgcgccctgcgcctggacaagctggagccgttcctggcccagctcaagcagttggacgaactggtcaagagttttccgacggtagagaccgcgtaagcgtcgtttctccggtagactttcccacgctttacgctcaggcctgcgggcctgggccttgtcgcctgcaagcctgccccgttgttccacccttgcggtcggtcaaaagattcccttcagctgcgtcgttttcgtcaactttggagtgtttacaacaatggcaaaaatcgtcgacatcaaaggtcgtgaagttctcgactcccgtggcaaccccaccgtcgaagccgacgtgcttctcgataacggcatcatcggcagcgcctgcgcgccgtccggtgcttctaccggttcgcgcgaagcgctggaactgcgtgatggcgacaagagccgttacctgggcaagggtgtactgaaagctgttgccaacatcaacggcccgatccgtgacctgttgctgggcaaggatccgctggaccagaaagccctggaccacgcgatgatcaagctcgacggcaccgaaaacaaaggcagcctgggcgccaacgccatcctcgccgtgtccctggccgctgccaaggccgccgcacaggaccaggacctgccgctgtacgcgcacattgccaacctgaacggcaccccgggtgtctactcgatgccggtgccgatgatgaatatcatcaacggtggcgagcacgccgataacaacgtcgacatccaggaattcatggtacagccggtcggcgccaagtccttctccgaaggcttgcgcatgggcaccgagattttccatcacctcaaggctgtgctgaaggcccgtggcctgagcactgcggtgggtgacgaaggcggttttgcaccgaacctggcgtccaacgaagatgcactgaaagtgatctccgaagccgtggccaatgctggctacaagctgggcaccgacgtgaccctcgccctggactgcgcggccagcgagttctacgaggacggtaagtacaacctgtccggcgaaggccaggtgttcaactccgaaggtttcgctgaatacctgaagggcctgacccagcgctacccgatcatctcgatcgaagacggcctggacgagtccgactgggacggttggaaaatcctcaccgacaagatcggcgagaagatccaactggtgggcgacgacctgttcgtgaccaacaccaagatcctgaaagaaggcatcgataaaaagatcgccaactcgatcctgatcaagttcaaccagatcggcaccctgaccgaaaccctggaagccatccagatggccaaggctgcgggctacaccgccgtgatctcgcaccgctccggcgaaaccgaagactcgaccattgccgacctggccgtgggcacctcggccggccagatcaagaccggttccctgtgccgttccgaccgtgtttccaagtacaaccaattgctgcgtatcgaagagcaactggctggcaaggccaagtacaacggtcgcggcgagtttcgcggctgatcgctagttgatggtgaaacatggtaaaaagtcggcggattgcgtcggaaaactcacgacagtgtggatttcggcgctaatctgatggctatcaagcacaagcctggtttttccaggcttcgtgctatcagttgctgcaaaagttttgcatggcggtcttttttcactggatacccgatattcgatgcgcagtcccaattggttgttcctcgtcttgctcttgttgctggctggcctgcagtaccgcctatgggtgggtaatggcagctttgcgcaggtaaaagacctgacccagcaaattgccgaccagcacgccgaaaacgaacgcctgctggagcgtaaccgcgtcctcgatgccgaagtgcttgagctgaaaaaaggtacggagaccgtggaagagcgggctcgtcatgaattgggcatggtcaaggagggcgaaaccctctaccagttggcccaatgagtaaccgtttgccggccttctgggccgtgattcctgccgcgggcgtcggtgcccgtatggccgcggaccgtcccaagcaatatctgcaactgggcgggcgcactattctcgaacacagtcttggctgttttcttgaccatccagaccttaaagggttggtggtcagccttgctgtcgatgatccttactggcccaacctgccttgcgccaacgacccacgcatcgtgcgtgcggatggcggcgacgagcgttcggggtctgtgctcaatgcgctgctgcaactcaatgccctgggcgccagcgatgacgattgggtgttggtgcacgatgcggcacggccgaacctgagtcgtgatgatctcgacaagttattaagcgaactgttgaacgatcctgtgggtggtctgttggccgtgccggcccgcgacactctcaagcgcgtcgacaagcatggccgcgtggtcgagaccgttgatcgcagcttgatctggcaggcttatacgccgcagatgttccgcctgggtgccttgcatcgcgcgttggctgacagcctggtggcggatgccgtcatcaccgacgaagcctctgccatggaatggtccggccaggcgccgcgcctgatcgaagggcgctcggacaatatcaaagtgacccggccggaagatttggagtggctgcggttgcggtgggctaaccgcaggtaattcgcgataccgtgtcgaccccatcgggggcaagccccctcccacattgaaatgcattccaagtgtgggagggggcttgccccctatgaggcccctccaaacaaccaacagtcaactgctgtactccggcctctcagccaacccctccttcaagaaatccaccaatttcctgaccttcggcgacaaatgcctttgctgcggatacaacgcccacaccgccgtattcggcggctgatgcgcctccagcaacgacaccagcgccccactgtgcagatgctcgagcacgtaatagtctggcaactggcacaacccgacgccctgtagcgccgcatccaacaccgcttgcccactgttgcagcgccaatttccctgcacgcgctgggaaaactcccgcccgtcctgggccagttgccagatatccgagctgccgatcaggcagttatgccgactcaattccgacaagctatgtggccgaccataccgagcgaggtaggacggcgacgcacacaggtacatgcgtcgaggtgcgaggcggctggcgaccatgcgcgaatcctgcaagcgccccaggcggatcgccaggtcgaggccttcatgcaccaggtccagttggcggttgctcagttcgatatccacccgcaactgcggatacagccccatgaagcgtgtcaccagcggcacgataaagcgctcgccatatgccacggcacaggtcatgcgcaacatgcccttgggctcgctggtgagatcgcccaccgcacgcagcgcttcctcacgcccgtcctgcaggcgttggcagtgttgcaagaaggtctggccggcctcggtcagggtcaccttgcgcgtactgcggtacagcaaccgggtttgcaggcgttcttccaggcgcgccacctgccggctgatatgggaagacgacacccccagccgttccgccgccgccgtgaactggctgcattcggccactgcgacaaactcatcgataccttcccagcggttttcaagcatgtcgattatccccatgcagcaataaagttttgcttttgcctggattattcatcagctagccatgttttacactcgtcgcctcagtttttaaccccgatggagaaacccggatgatcaagtcccgcgccgccgtagccttcgaagccaagaagccccttgagatcgtcgaagtggatgtcgccatgcccaaggcgggtgaagtgctgttgcgcgtggtcgcgtccggcgtgtgccataccgacgcctacaccctgtcgggcgccgacccggaaggcatcttcccgtcgatcctcggccatgaaggcggtgcggtggttgaggcgatcggtgagggcgtgacgtcggtagccgtgggcgatcacgtcatcccgctgtacaccccggaatgcggcaagtgcaagttctgcctgtcgggcaagaccaacttgtgccaggccatccgttccacccaaggcaaaggcctgatgccggacggcaccacgcgtttctcctacaaaggccaaccgattttccactacatgggcacctcgaccttctccgagtacaccgtgctgccggaaatttccgtggccaagattcctaaagaagccccacttgaaaaagtctgcttgctcggttgcggcgttaccaccggcatcggtgctgtgatcaacaccgccaaggtcaagccaggcgataccgtagcgatcttcggcctcggcggtatcggcctgtcggcagtgattggtgcggttaaagccaaggcaggtcgcatcattgccatcgacatcaacccggccaagttcgaaatcgccaagcagctgggtgcgaccgattgcatcaacccgaaagactacgatcgtccgatccaggacgtgatcgtcgacctcaccgacggcggcgtggacttctccttcgaatgcatcggcaacgtgcaactgatgcgcgccgccctcgagtgctgccacaagggctggggcgagtcggtgatcatcggcgtggccggtgccggccaggaaatcgctacccgcccgttccagttggtgaccggtcgcgtctggcgcggttcggccttcggtggcgtacgtggccgctccgaactgccaagctacgtggaaatggcccagaccggcgagatcccgctggacaccttcatcacccacaccatgggcctggaagacatcaacaaagcgtttgacctgatgcatgaaggcaagagcattcgtaccgtcatccacttctgaggttcgccatgagtctggaaaacctgtcgtgccagaagagcttcggcggctggcataaacgctacaagcatcattccgatgtgctcggttgcgacatgaccttcgccgtttacctgccgccgcaagcggagcagggcggcaaattgccggtgttgtactggctgtcgggtctcacctgcaccgatgagaacttcatgcagaaggccggcgcccagcgcatggctgccgagctggggttgatcattgtggcgccggacaccagcccgcgtggtccgggtgtgccgggcgacccggacaacgcgtgggatttcggtctcggcgccggcttctatttgaatgccacccaggaaccctgggccaagcactatcggatgtatgactacgtcgtgcaggaattgccggcgttgatcgaagggcatttcccggcgtcggataagcgcggcatcagcggccactccatgggcggccacggtgcgctggtgtgtgccttgcgtaaccctggacgttacctgtcggtgtcggcgttttcgccgatcaacaacccgatggattgcccatggggccagaaagccttctcccgctacttgggtgaagagcgttccaagtggcgcgagtgggacacctgtgtactgatcggcgaagcctcggaaaagctgccactgctggtggaccagggcgaccgcgacgatttcctcgccgtgcaactcaagcctgaagccctgcaacaagcggccaaggcagccaaccatccgctggaactgcgcctgcaacccggctacgaccacagctacttctttatcgccagcttcatcgaagaccatttgcgacaccatggccgtgctttgctcggttaatgtgaggcaaaagtaggtagaatcacgccctgaattaaatcggggcgtttttttatgcgtattggccacggctacgatgtgcaccgtttcgccgaaggcgatttcatcaccctgggcggcgtgcgtattgcacaccaccatggtttgctggctcattccgacggcgacgtcgtgttgcatgccttgagcgatgcgttgcttggcgcagcggcattgggcgatatcggcaagcactttccagacaccgacccgactttcaagggcgcggacagccgtgtcttgttgcgccatgtggttggcctggtccatgccaagggctggaaggtcggcaacgttgacaacaccatcgtggcccaggcgccgaagatggccccgcatatcgagtcgatgcgcgcgctgattgccgccgacctgcaaattgaattggatcaagtcaacgtgaaagccaccaccactgaaaagctcgggttcaccggccgtgaagagggcattgccgtgcactccgttgccttgttgctgcgcgcatgaatgacctgcaactgctgggcccgcgagcctatggcgaggccttgggcagcgcggtactgaaggcgacggccgaagacttccaggtcgacgaggtgctggacattccgctgaccggtgaaggcgaacacctgtggttgtgggtggaaaagcgcggcctcaataccgaggaagctgcgcggcgtatcgccaaggcggccggggtgccgttgcgcaccgtcagctatgccgggctcaaggatcgccaggcgttgacccgccaatggttcagcgtgcaactgccgggcaaggccgacccggacatgagcgcggcggagaatgacacgctcaagattctcaagaccggccgccacaagcgcaagctgcagcgcggtgcgcattcggccaatgggttcactttgcgcctgacgcagttggccggtgataccgccgccatcgatgcgcgcttgcaacagattgcccaacacggcattcccaactatttcggtgcccagcgctttggccacaatggcggcaatgtcgtggacgctcgcgagtgggccgcccgcaaagccttgccggagcagcgcaatgtgcgttcacggttgctgtccaccgcccgcagctttttgttcaacaaagtgctggccgcgcgcgtggccgatggttcgtggcaacgtgcccaggtcggcgacctgctggcgtttaccgacagccgcagttttttcccggctggcgaagcggaatgcagcgacccgcgcctggccattctggacctgcacccgaccgggccgcagtggggcgagggcgactcgccagccagtggtgcaaccttcgagctggaacaggcggttgccgctggtgaagccgacttgcgtgattggctggtgaatgccggcatgagccaggaacgtcgcattcttcgactgcccattggcggtttgacgtggcattatccctcgctggacattctgcaattggaattcgtcctgccggccggatgcttcgccactgtgttggtgcgcgagcttgttgatctggtgccggtggggcagacggacaacccatgcgtattctgatatcaaacgatgacggtgccaccgcacccggtcttgccgcgctctatgctgcgctgcaggattatgccgagtgcgtggtggttgcccctgaccaggacaagagtggcgccagcagttcgctgacgctcgaccgtccgctgcacccgcaagtcttggccaatggctttatcagtgtgaacggcacgcctaccgactgtgtccacctggcaatcaacagcctgctggaccaggcgccggacctggtggtgtcgggcatcaacctcggtgcaaacctgggggatgatgtgctgtattccgggaccgtggcggcagcccttgaggggcgcttcctgggccgtaccgggttcgccttttcgtttgcctcgcggcaactggataacctggcaaccgccgcgcatttcgcgcgcaagctggtggaggcccatggctctctggacctgccaccgcgtacggtgctcaacgtcaatattcccaacctgcccctcgatcatattcgcggcatcaagctgacgcgcctgggccatcgcgcccgtgcggcggcgccgttgaaggtggtcgacccgcgtggcaaggaaggctattggatcgcagcggcaggtgatgctgaagatggtggtgaaggcacggactttcatgcggtgatgcaaggctatgtgtcgattaccccattgcaatttgatcgcaccttcagtgatgccttcagtggtctcgatggctggctggaggggctgcgctgatgggccgtgaacaagacgacttgctgcgccggggcatcgggatgacgtcccagcgtacccgtgaacgcctgatccagcgcctgtacgaagaaggtttgtccaacgcccaggtgctggaagtgatccggcgtacgcctcgccacctgtttgtcgatgaagccctggcccaccgtgcctatgaagatacggcgctgcccatcggccacaaccagaccatctcccaaccgtacatggtggcgcgcatgagcgagctgctgctggcggcggggccgttggacaaggtgctggaaatcggcaccggctccggctaccagactgccgtgctggcgcaactggtggagcgggtgttctcggtcgagcgcatcaaggtgctgcaagaccgggccaaggagcgcctggtggagttgaacctgcgcaacgtggtgttccgctggggggacggctgggaaggctggccggcgctggcgccttacaacggcatcatcgtgaccgccgtggccaccgatgttccgcaagcgttgctcgatcaacttgcccccggcggacgcctggtgatcccggtaggctccggcgaagtgcaacaattgatgctcattatccgtgaggatgaaggcttttcccggcatgtgctgggggccgtgcgttttgtgccgttgctcaatgggccgctggcctgatcatttgttcgcgggcagtgaattctgttggcggggatgtgtcttacggcggggtctatcgagtcaacatgatcgggagtcggaattaaacgcgatgaatgtttcgtttccggcgtgtgacggtaaaactccaatgcccagttatacttgcgtcatatttcaagcctgatacaggcattcatgttcagccaccacaaagggagcggcgggtgagtctcacaggtcttgcgcagggtatgagtaaaacaagctttcatcgactggtgcttggcctcgtcttcagttccgtgctggtcggctgctccagctcgccaagcagcggcgcacgggtggtggaccgtaataatgccgtgccgcaaaagccgacggtgaccaccgggcaatacgtggtgcgcaagggcgatacgatgttctcgatcgccttccgctatggctgggactacaaggcgctcgcagcccgtaacaatattcctgtgccctacacgatacatcccggtcagacgattcgcttcgacggccgtaccggttctgcgcctacgacagttgtgacaaacactggatcttcgccgtcgtcctccagcaaaaccaccatcattacccgccctgcaggcaccgccgcacctacccctgcaagcaagccggcacccgcgccgttgccacctgccgggcctgcgccgaccggctggggatggccctcaaacggagtgttaattggaaaattctcttcaaacggtagtttgaataaaggcattgatatcgccggagatttgggacagcctgttttagctgcgtctgatgggacagtggtgtacgccgggagtggtttacggggctacggcgagctggtcatcatcaaacacagcgacacctacgtcagtgcttacggtcacaaccgcaggctgttggttcgggaggggcagcaggtcaaagtcggacagacaattgccgaaatggggtcaactggtacagaccgggtgaaactgcactttgagattcgccgtcaagggaagcctgtagatccgctgcaattcctaccccgtcgttgatgtgttgcacagcctgttccctcacgtagaaggaacaggctccagcgttgccaaggataaaggcgccgcttgagcttgaggtcgaactcaccaaaggactataacaatggctctcagtaaagaagcgccggagtttgacatcgacgatgaggttctcctgatggagaccggtatcgctacggaatcgatgtcgaatgagggacctgctgtaccttcagttcgcaccaaatccaagaactccaccgcgttaaagcaacacaagtacattgactacactcgggcgctcgatgcgacccagctgtacctcaatgaaatcggcttttcccctctgttgactcccgaagaagaagtccattttgcgcgcttgtcgcagaagggcgatccggctgggcgcaaacgcatgattgaaagcaacctgcgcctggtggtgaaaatcgcccgacgctatgtcaatcgtgggctgtccctgttggacttgatcgaggaaggcaacctgggcctgatccgggcggtggagaagttcgaccctgagcggggcttccgcttttcgacctatgccacctggtggattcgccagaccatcgaacgggcgatcatgaatcagacccgtacgatccggttgccgatccatgtggtcaaggagctcaacgtctacctgcgggcagcgcgtgagcttacccaaaaactcgatcatgaaccttcgcccgaagaaatcgccaacctgctggaaaaaccggtaggggaggtcaagcgcatgctgggccttaacgagcgtgtgtcttcggtcgacgtctcgctgggtccggattcggataaaaccctgctggacaccctgaccgatgatcgtcctacggatccttgcgagctgttgcaggatgatgatctgtcccaaagcattgaccagtggctgtcggaactcacggacaagcagcgcgaggtggtgattcgccgcttcggcctgcgcggccatgagagcagcaccctggaagacgtaggcctggagatcggcctgacccgtgagcgggtgcggcagatccaggtagaagggctcaagcgcttgcgtgagatcctggagaagaatggcttgtcgagtgagtcgttgtttcaataacgaattggcttgaatgcttgaatgtgggagggggcttgcccccgatagcgatggttcagtcaaatctgtattgactgacacactgcaatcgggggcaagccccctcccacattggtttatgccgtatcttatttgcagatagggccaaatcccaggcataaaaaaaccccgcttttaagggcggggtcttttcgactaagtcagtacaagttagataacttgaacttcttcagcttgcatgcctttctgaccgcgggtagcgatgaaagaaacctgttggccttctttcaggcttttgaagccgtcggattggatagctttgaagtgaacgaacaggtcgtcaccggattgtggagtgatgaagccgaagcctttttcatcgttgaaccacttaacggtaccagtttggcgattagacatggtgtatctccttggacaaagttaactgcgactcaggaaaagccctggccgagactgagtgcaaagagcaggaaaaattcttggagatggttggatcgaaattcaacatatcgtgtagagattctcagtgacacaagcagcacagtggcgccaccttaaccctttttccggaacgtgccaatggtatttccgaaggtttctccattttcgtgactggcggtggtatttgcggtcaccttgcacggcaatatgggtcccggccccgctggctgtggcttatagcagcaggcgcgttcatcaagaaaagccgcgtggcctttgaaccccaacgccggccccggtaagatgccccacagaatttttccacctcgctattcaggacacccgccatgagcatcaaatcggacaagtggattcgccgcatggcgcaagaacacggcatgatcgaaccgttcgtcgagcgccagatccgtggccaaggcgatgccccggtgatttcctacggcgtttccagctacggctacgatgtgcgctgcgccgatgagttcaaggtgttcaccaacatcaactcggcgatcgtcgatccgaagaacttcgacgaaaagagcttcgtcgacgtcaagagcgacgtatgcatcatcccgcccaactccttcgccctggcgcgcaccgtggagttcttccgtatcccgcgtgacgtgctgaccatctgcctgggtaaaagcacctacgcgcgttgcggcatcatcgtcaacgtgacgccgcttgagccggagtgggaaggccacgtgaccctcgagttctccaacaccaccaccttgccggcgaagatctatgccaacgaaggtgtggcgcagatgctgttcctgcagtccgacgaggcctgtgaagtgtcctacaaagaccgtgccggcaagtaccagggccagcgcggcgtcactctcccacgcgcctgatcgaaaggtcttacacgcaaagggaattagtctgcggaaagtgactctatctaggtgtactgcctcggcgcgtgtaaaacgcgccgggccacgcttgaggagtaccttatgaagctcgacccgcgaatcagcgcagaacttgcccggcttgaacccaaccagattggcgttctggcctngcaaagggaattagtctgcggaaagtgactctatctaggtgtactgcctcggcgcgtgtaaaacgcgccgggccacgcttgaggagtaccttatgaagctcgacccgcgaatcagcgcagaacttgcccggcttgaacccaaccagattggcgttctggcctggtccttgatggccgaccccgcatacgggggcggcatccccggccaacctgagccggactacccccaacccgccgaacccggtgagccgaccctgccggacgagccaccacccgcacccgttgcctgatacctagcccacaggccacacctcctgatcgccgaccacaaagagtcggtggtcatcggcctgctccaccgcaaatccaccggtaaacgcgccaaacgccggcaacaagctgacccgcgtcccgatctgaaagcacggcagccgcaggctttgccggcccttgccacgcaagcgatacaccggatgcacatgccccgccagcacgtggtggctggggtgggcatccggttcgtgctgcaaggcaaaggggcccatcagcagcggttccggcaccacttcaatcttcaggtcgggcggtgggtcaccggcgcgtttatcgtgattgccgcgcaccagggtcaggggcaacgagggatgacgctcgcgccaagcccgcaacgcgcccagtgtgccgctggcgtgggagccggggccatgcaggaagtcgccaagaaagatcacctgcgcgcacccatgggtagcgagcagccggtccagccgctcaaggttggcagtggtggtcccttgcggcaccggctgccccaggctgcggtacgccgaagccttgccaaagtgcgcatcggcaatcaacaggcacccgcgcgcaggccagtagatcgccttgtctgccagcaaccacaattgctcaccttccagcgttatcgaacagaccatcagcgcttcccgttatccgcgaccttttccaggtccttgaccattcgtgcaatgcgctccgagagtttttccgaactcatgctttcgcgcatccgctcgaccagcagcggaaaagccaggggagtcggccgttcgatcaggtgcaggtccagtttcagcgccgacagatgacgcaacgtcgcttccaagcgacgaatatccaattcatcgcgcaggacttcttccccggcttgggtcagtaatcggttctgtgggtcatattgcttgaacacctcgaagaacaaaccgctggacgcctgcacctgccgcgtacttttcggtgcgccgggatagccggcgaacaccagcccggcaatgcgtgctatctcgcgaaagcggcgcagggccagttccccggcgttcaggctggccgccacgtcttccaacaggttttcagggctcagcagcgcctcattcaataatccgggccaatccacaggcgtggcgctcaataactccagcccgtagtcattcacggcaatcgaaaaggtcactgcctgcccctggctcacccgccacgccaacagactcgccagccccaggtgcacctggcgcccggcgaagggatagagaaacaggtgccagccttcccgggatttcagcgcttctgccagcagatgctcgcgcgtcggcaggccggaccagcgcaactgcgtctgcaagaggggttgcaccgcgcgcatctccgggcctttaaagtgcccgtgcgccgccgcatcaaaacgctccaccaccgcctgggccagctcgttggaaagcggcatgcgcccgccattccagcgcggcacggcggcttttttggcgctgctgcggcgcacgtaggcggtcatgttttccacacgcaccagctccagcaggcgcccggcaaacaggaaaccatcgccgggcttgagccgcgcgataaaaccttcctcgacactgcccaggttcttgccgccaccgcccttgctccagtacttcaagtggatgctcgcgtcactgacgatggtgcccacgctcatgcgatgacggcgcgccaggcgggcatcggggacgcgccagatgccctgttcgtccggctccacgcggcggtagtccggataggcggtcagcgacagaccgccatggcgcacaaaccccagcgcccacgcccagtctgcgtccgtgaggtcgcggtacgcccaggccccgcgtacttccgccagcaacgcatccggcgtgaacccgccgcccagcgccatgctcaccaaatgttgtacgagtacatccagcggtttgtgcggcgattcccgcgcttcgatgcgtcgctgggcaattgcatcctgggccgccgccgcttccaccagttccaggctgtgggtcggcaccagcgtcacccgcgagggccgccccggcgcatgccccgagcgcccggcgcgttgcatcaggcgtgcaacacctttggccgagccaatctgcaacacccgttccaccggcaggaagtccacccccaggtccaggctggaggtgcacaccacggccttgagttggccgtccttcaacgcccgttccacccagtcgcgggtctctctggacaatgaaccgtgatgcagggcaatcaccccagcccagtcgggccgggcgtccagcaacgcctggtaccagatttccgactgcgcccgggtattggtaaacaccaggcaactgctgctgctttcgacctcggccaccacctggggcaacatcttcaagccgatatgcccggcccagggaaagcgctcggcaagcggcggcagcaaggtgtcgaccttcagctctttggccgtttgcccctgtacattgatcccgtcgccttgtgggaccaacacctccaaggcgtgggattgattacccagggtcgctgaaatgccccacaccatcaaacccggatgccagcgccgcagccgcgccagcgccagttgcaactgcacgccgcgtttgttgccgatcaattcatgccattcatcgacgatcaccatgcgcacgtgtgccaggctcacttcgctgtcggcgcgggccagcatcagggtcaggctttccggggtggtcaccagggcggtgggctggcgccgtgtctggcgggcgcgctcgctgctgctggtgtcaccggtgcgcaggccgacgctccagggaatctgcagggcttccagcggtgcttcgagggcgcgtgcggtatcggccgccagggcccgcatgggcgtgatccacagcaccgtcagcggttcagcgggcggtttgcgtttacccgtcacgggcgggcgagtgatggcgaagcgattgagcgccgcgaaccatagcgcgtaggtcttgccggcgccggtgctggcatgcagcaatcccgactgaccgcccttgactgccgcccatacctctttctgaaaagcgaacggcttccagcctttggcggcaaaccactgtttggcgaagtcgatgggttttgccatggggcggcgcaactctggaaggtctattccacagaccttccagcgcgcccaaaggtttacttcaaattgccactcaggaactgctgcaagcgctcgctcttcggattgcccagcacgtcctcaggcgcgccttgttcctccaccaggccctgatgcaggaacagcacctggctcgacaccttgcgtgcaaagctcatctcgtgggtcaccatgatcatggtgcggccttcctcggccaggccttggatgaccttcaatacttcacccaccaattccgggtcgagggccgaggtgggttcgtcgaatagcatgacctccggttccatcgccagggcgcgggcgatggcgacgcgttgctgctggccgccggacaggaacgcggggtattgatcggccacgcgcgccggcaaacccaccttgtccaggtagcgacgggcgcggtcttcggcgtcctttttgctgcaacccagcacccggcgcggggccatggtgatgttttccagcacgctcatgtggctccacaggttgaagtgctggaagaccatggccaggcgcgtgcgcaagcgctgcagttcggcgtcatcggccacgcgcatgccgtggcggtcactgaccatgcggatcggctggccgtcgagggtcatggcgccgtcgttgggcgtttccaggaagttgatacagcgcaagaaggtgctcttgcccgagccgctggcgccgatcaggctgatcacgtcgccggtcttggccttgagcgaaacacctttgagcacctcattgtcgccatagcttttatgcaggccttcaacggtcaatttgtacatggggcatgcatcctcaaggcgaaagtagatagccgctgcggtaggcctcggtgccagcgacatggccgatgaccatcccggcagtggccatgcggcgcagcgaacgtgcgtaaagcaggccggccttttggcagtgcacgggcgttacgcggtcggaaatggggtcgatgatttcggcgatcagttgcccggcttccaggtattcacccggcagggcgctgaacaccagcaggccgcccaccggggtcgccaccggttcaacgccggccagcggcgtggccgggtagggcaggtcgggcagcggtgcggcatcgcctgcaatggcgccgaagtgaatcaggtaatcgatgatcgcctggcagtcgaggctcgccaggccatggttgacgtcaccctggccgcgcagctcgacggtgaccgaaaagctgcccatggggatcgggaaacgctcgccgaaacgttgctgcaactgccaccacaccagggtgaaacactcatcgaaggattgcccgccggaatcggtcgcgagcaaattggcctccgaaccgatatagcgcgccaacggctccacctgcggccaggcctcgggggtggtgtacaggtgcgccaccgcttcgaagtcgcagtgcaggtccagcaccatatcggcatcgcaggccaggcgttgcagcaccaggcgttgggattgcagttgggtctcggcacgctgcgcggcgagggtggaggacagcgcggagcgcaccagctcgacgtttcgccggggatcgtcccccagccgttcctcgatctggtcacccaccgcttcactgaggtcgacaaacaggcgattaaagttttgcccgctctccagctcgtagcggcccagcgggatatccatcaacacctgctccaggcccaccggattggcgatgggcaccagcacgatctcgctgcgcaggcgcccggctgctgccaactctgccaggcggagcttgaggtgccaggccaccagcatgcccggcagctcatcggcatgcagcgatgactgaatgtagatcttgccctcggcctgttccgggccgaagtgaaaactgtgaatctgccgcgccgtgcctggcaccggcgcgatcagctcatggacgtgatgccgcatgaatgctcctgaaaatgaaaagctgcttaatggctcggcccgaggaaagccagccagcggcgctctgccagacgaaacagaccgaccagggcaaaggtcacggtcaggtagatcagcgcagcgataccgaatgattgaaaggtcatgaaggtagccgagttggcatcccgcgccactttgaggatgtccgggatcgtcgcggtgaaggccaccgtggtcgagtgcagcatcaggatcacttcattgctgtagtagggcagcgaacgacgcaacgccgacggcatgatcacataggcgtacaacttccagccgctcaagccgtaggccttggccgcctcgacttcaccatgggccatgctgcggatcgccccggcgaagatctccgtggtgtaggcacaggtgttgagagcaaacgccaggatggtgcagttcatcgcatcgcggaaaaacgcatccagcaacggctgctcgcgcacggcggcgatgctgtagatgccggtgtagcagatcagcaactggatatagagcggcgtgccccgaaacaggtaggtgtagaactgcaccggccagcgcaccaggcgcttgcgcgacacacgggcgatggacagcgggatcgacaccagaaagccgatgaccagggctgcggtgagcagccacatcgtcatggccagccccgtgatgtgctggccgtcgctataaaggaaggggcgccagtattcctgcaagagttcgatcatcgtacggcctcccgggcgccggcggagtagcgacgttcaaggcggcgcaggacaaagttggacgcgctggtgatcaacaggtagatcagcgcggcgagtacgaggaaatagaacagctggtaagtgctcttgccggcgtcctgggccgccttgaccaggtcggccaggccgatgatcgacaccagggccgtggccttgagcatcaccatccagttattgccgatacccggcaaggcaaagcgcatcatctgcgggaaggtcacgtagcgaaaccgctggccgcgcttgagtccataagccgtggcggcttccagttggccgcgcggcaccgcgaggatcgcgccacgaaaggtctcggtgaagtacgcaccgtagataaagcccagggtgatcaccccggcgctgaatgggtcgatctcgatgtattcccattccatgaagtcggtgaggccggtcaaccaggtttgcaggctgtagaaaatcagcagcatcagcaccaggtcgggcactccgcggatcagcgtggtgtagagctgggcggggatgcgcaggaagggcaggctggacagtttggcgctggcgccaatcagccccagcaatacgctgacggccagcgacagcaccgacaacttgatcgtcatccaggtgccttgcagcaacagcgggccgaaacccttcaggctgagcgcgctcaacccgagggtttgcaacaattcttcgaacataaatcaggacctatggcgataaaaaagcgcccctccaggggaagggcgctccaggcattatttgccgctgtacaggttcagatcgccaaagtgtttcttctggatggtggcgtaggtgccatcatcgtgtaacgctttgatacctttatccaaaagcgccttcagctcagtgttaccttttttgataccgacggcggttttcgacggcagcaatgggtcgtcgatggccgcgctgacttcataaccggcgcctgccggcgacttcaggaagcccagttcggcttgcagcatgtcctgcacggatgcgtcgagacgcccggaggtcaggtcggcatacacttggtcctggttggcgtaggccttggtggtcacaccggctttatccagtacggccttggcgtaggcttcctggatggtgccttgctcgtagcccacggatttgcccttgagggactcaggcgtcgagtagccagcacctttcttgaacaccagcgaggtcgggccggagaacagttcgctggagaagtcgatggccttttcacgcaccggggtcacggtcatggacgaaatcacgccgtcgaacttgttggccttgaggcccggaatcatgccgtcgaaatcactttctacccacttgcactttactttcagctcggcgcagatcgcattgcccaagtcgatatcgaagcccaccaggctgccgtcggcggccttggattcgaatggcgcgtaggacggatcgacaccaaaacgcagttccttgtattccttggccgtggctacacccgcggccatgcacagagccagtgcagaaagggtcagcaatgcttttttcattatgtaatccctggaaaccaagataagcgcttgtggcgcgtttaggactgttactgaacggtgtcagacggatcacaagtagcaatttctgcaccatagttccgaatgtagttccgaatgagcgttttaaaaggtgggatgagggagatctgagtgtaggagatgcccgaaaatgggcgctgaaaaatgagcgcaccatttcgggtcataaagaaatttaaatgtgggaggtgtcaggtaagcaggtcttgcagggtggcaaggctgtcggcctcatccaccgccttgtcctgccgccagcgcaacatccgcggaaaccgcacggcaattccgctcttgtgccgcttggacaaggcaataccctcgaatcccagctcgaacaccatgctcggtgtcacactgctcaccgggccgaatttttccacggtggtcttgcgcacaatcgcgtcgaccttacgcatttcttcgtcggtcaggccggagtaggccttggcaaacggcaccagcgtgcgttcgctgccggccgggccgtcccacaccgcaaaggtgtagtcgctgtagaggctggcgcggcggccgtggcctcgctgggcgtagatcaacaccgcgtcgacgctgaacgggtcgaccttccacttccaccacacgcccatgtccttggtacggcccacgccgtagaggccatcgcgggccttgagcatcatgccttccacgcccaggctgcgcgaggcttcacgctgttcagccagcgcttcccaggtggttgcggtcagcaacggtgaggcgagcaatactggttggttgcactgggtgaccacctgctcaagctgggcgcggcgctcggcctgggtgtggttgcgccagtcgtcgccccgatgttccagcaggtcgtaggcgaggaccgcgaccggcgcatcctccagcactttcttgctcaacgtcttgcggccaatccgttgctgcaacagggcgaagggttgcaccgcgtccttccacaccacgatctcaccgtcgatcaccgtgccgtccggtaacccactcaccaggctgtgaagttcgggaaaacgctcggtcaccagctcttcgccacgggaccatatccacaggcgcccatcgcgcttgaccagttgtgcgcggatgccgtcccacttccattccacctgccagtcggcgggagaaccgagcagcgcttcgaattgctccaccggttgcgccaagccatgagccagaaaaaacggataaggctggccgccccgttgtgcatgctcgtcggacgattcggcggcgatcagcttgaggtagccctcagcggttggacgattggacaggtcggtgtagcccactaaccgctgcgccacacgcttgctgtcgaggtcggccatggcggcgagggcacgggtgaccaacaacttggatacgcccacgcgaaaactgccggtgatcaacttgatgcacaccatcaggctcggttgatcgagttgcgcccacaacgccggcaggcgctcagccaattccaggggaggcaagccgcgcaacggcaggagtttttcctccagccacacggccaggccatcctccgaggtgtaggcagattccggtagcagcagggaaatggtctccgccaggtcacccaccgactgatagctttcctcgaacagccacggctcgatgccggacgctgcggtggccatgtcccgcaacaggcgggtcggcaccaattgccgtggccgtccgccggacaggaaatacacggcccaggcggcatcttctggcgcggccccccggaagtaggcttgcaacgcggccagcttggcgttgctggaggtggtggcgtcgagattggcgtacagctcggcaaaggccttcatgcgccggcctcttcttcgtcatcgccgtattcggtggtgaagccctgggcatccaggcctttttcccgcaggtggcgcaccaatacgccgacagaaccgtgggtgaccatcacccgctcggcgccggtctgctcgatggcccacaacagtccgggccaatcggcgtggtccgagagcacaaagccccggtccaccccgcgccggcggcgggtgccgcgcaggcgcatccagccactggcgaaggcgtcgctatagtcgccgaagcgcttgatccaactgctaccgccagcggagggcggggcgatgatcagcgcttggcgtagcaacgggtcggtcttgttgaagtcgccggcgtagagggtttcagggatatggatgccggcctcgcggtacacccggttcaacggttcgaccgcgccatggctgaggatcgggccgatgctggcgtcgatgccatgcaggatgcgctgggccttgccgaacgagtaacagaacaacacgctggctttgccgacggcgatgttcgcctgccaccagtcgttgatcccggcgaagatcagcgcctggggctgccagcggtagatcggcaggccgaaggtggattcggtgataaaggtgtggcaacgcaccggttcgaacggcgcgcaggtgccatcgggctcgaccttgtagtcgccggacgcgacccagacctcgccctggtactccaggcgcacctgagccgagccaagcacatgcccggccgggtgaaagctcagggtgacaccgtggtgcaccagtggctcgccgtaggccagggtttgcaggttgatgtcctggcccagcctggagcgcaggatgccttcgccgggggctgccgccaggtagtgctggttgccagtgcgggcgtggtcgccgtgggcgtgggtgatgaccgagcgctccaccgggcgccaggggtcgatgtagaaatctccggcggggcagtagaggccttcggggcgggcgatgacaaggtccatggggtgaccgggggaggtgggcttgttacttatgaggcggggctgagctgagaagttctatcggagtgcatgcagtccaaatgtgggaggggcggtgcgacgattcgacttgcccccgattgcggtgggtcagttgcaccttggctggctgatacaccgctatcgggggcaagccccctcccacattagatccaggtttttcatgaaaagccgggttatttaccgggtgtcagggtcaaccgggccttcccgtacaccttctcgaagttctgcggttgcatcgggaagctcaggtattgcgccttgagcgacgggtcgatgccattggcatagttcgggctggccgggttgccggattggccgatgccgccctgacccatcatcggctccacctggccgaaatcgacaatcaggcgcagcgccggcacctgggtggtggtgaagtcctggccccagctgtagggcgccgggttcaaggtgttgtggtcgccaccggaggccagcgggccacgaatcacctggccattggcgtttttccaggtggtggtgtgcagcttgccccactgccaggccttgtggtcggcgcccagctgactgtcgccggcgctgatcgcggcggccaggctgcgggcgaggatcgccggtttgtcttctttctgcggcgtacgcacgtcatcccagaacgggctgtcttcgcggcccagcaagtgatcggcctgggcggcataggacaggctggcgttgctgacaaaggctttccagctggcgctgttttccggccccagctcgtcgaggaagatctgtctggtgctctcctgcaggaacagttcgtagagcgccgcatcggcagaggtggacaccaggcgaccatcgaacgccatcaggcgccccagcgcctcacgggccttggcctgttccgccgcaggcagtgcgtcaatcgcctgtttcagcggctgggccatgcccggcgcctggaacatgctcttgagcttggcggcgaaggtggtggtttggtcgtactgcatggcgatcatgctgcggctgtcatgcttgccggcattggccagttgcgccaggcgctcgctgcgctccggggcgtcccaggagttggacagttgcatgccatagccacgcggcgcggtgcgctggttggcggtgccgatccagccttgggccggatcctggtcatagggatgcagcatcgcgtcggcgtagccatcccagtcaaaccgcgtgtcccagcccggcgacggcagcaagccttcgccttcgcggcggttagggaagcggccggtgacttgccagccaatgctgccggcgtcggcgaagatcatgttaagggcgatggcgcggatttcccgggtcgcatccgaggctttgccgatggtttgtgcgcgggacaggtcgaagaacgcatccaggctcttgtcgtccttgaagtcagcggtttgcagggccaggcccagaccggtggtcaacgcctgactgctattgagcagggcgccatgacgggtttcgtacaccacctcgcggatcgagcgttggcccttgatgaagaaggtttcgttacgcacgcctgccggcagccatttgccgttgttctcgtagtacagcgcgctgccctggcgcttgaccttctccaggaacaggtcctgggtgtcgcccttgaccgtgctcatgctccacgcgactttgccgttgaagccggacaacagtgtcggcaggccggcaatcgaagcgccggcggcctggtatttcggtgcacggatctgtacgtagctccacggcgacggtgcctgcggctgggcggcgaggtcgcctgccagcaggcttttaccgctgcggctgcgctgcggggcgatggcccagttgcttgaggtggtgactgccagggcgttgaggctgctcagttgctggctgaccgcgtccagcccggccaggccggtgatctgacccaggttcacacccttgagtttttcggcctcggccagtgggatcgcttcatccggcgcgctgggggtgagccaggcgagtttgtcgacgccgaccttctgcgccagcaccagcgacgaaatctcttcatgcaggttggccgattcgctgaaattcagcaggcagaacagcagcgccgaatcttccggcttccagtactcgggcttgtagccggtctgggccaggtccggcggcagcttgtcgcggtagcggaacaggtaggcgttgacgccgcgcgcatacacttcaaagaagcgcttgaggcgcgggctggaggcgttgtacagctcgccggcgcttttcttcaggttgaccgcgcgcatgaagcggtcgacatccagcacttcgggcccggacatttccgccagccggccctgggccagcaggcgcagggtgaccatctgggtgatgcgatcactggcgtgcacataaccgaggctgaacagcgcgtcgtggaaggtgttgctttcgatcaacggcatgccctgggcattgcggcgtaccgatacgttctgcgcgaggcctttgatcggctgtacgccggcaaccggcggcagggtgtcctgggtgctctggagctggcaaccggccaggcttaacgcactggccattgccgcggcaacgccgaaccggggaagaaaatgtgagagggctggcgaggccatggcaaagctcctgcggggggtagcgtcagtaaaggcgctacgttagtgagcgcggcgaaacgacgcaagcgggagccatgccttattttcaggaattgcgtatcaagacttgggcgggttcactttctgcaccagctcatacgcccgaaccgtcgccggccgttctttgatgctgttgaaccagcgctgcaggtgtgggaaatcttccaggcgctggctctgccatttgtgggaaacaatccacgggtagatcgccatgtcggcaatgctgtagtcctcaccggccacgaacgcacggtccgccaggcgccggtcgagcaccccgtaaaggcgtgcggtttcatccacatagcgtttgatcgcgtaggggattttctccggtgcgaattggctgaagtgatgattctgccccgccatcgggcccaagccgcccatctgccagaacagccattgcagcacttcctggcggccacgcaggtcgtttgcaatgaactgaccggttttttccgcgaggtacaacaggatcgcaccggactcaaacagggaaatcggtgcgccgccgtcggtcgggttctggtcgacgatggccgggatgcggttgttgggagcgatcttcaggaagtcaggcttgaactgttcgccctggccaatgttgatcgggtgcaccttgtagggcaggccggcttcttccaggaacaacgatattttgtggccgttgggggtggtccagtaatacaggtcgatcatgaagctctccaaaagtggtgatgcttgagcggatgcctgtaggtataggtaatgttgggcgtgcgaaaattcaatgaaacatttatgcatacccttagaagccaatcagaaagcgccatccaccaacacctgcaacgactgctcagaacaacgttcgatgcgcgcccgcacgcgatacacctcggcaaacaacagcgggttgagcacgtcgtttgccgcgccgctggcatacaagcgaccctggcgcagcacggcaatatggtcggcaaaacgtgcggcaaggttgatgtcgtgcaataccaccacggcgatcaggttgtgttcgcgcaccaggtcgcgtacgcactccatgactttcaattggtagttgaggtcgagggcgctggtgggttcgtccagcagcatcacttgggggcgccgtgcaatcagctgcgcgaggctgaccagttggcgttgaccgcccgacagcgtgcttaaccactgatcggccaggtgcgcgatgccaatgcgttgcaacgctgcaaaggcttcgcgcaggcaggcgtcgttggacaatggaatgccgtccacactggccacgcgcagcgcggcaattacactttccatcacgctgaggctcaggcccggtggcaggttctgcggcatgtaggtcacgcgccgggcgcgctcggccacggacatggccgacaggtcgagttcacccaggcttacgacgccttgcatcttttccagcccggccacggcgcgcagcaaggtggacttgccggcgccgttggggccgatcagggcggtcaggctgccgtggggcaaggtcggcaggctcaggtcatgcacgatctgcctgcggccataactcacattggcgttgtgtacgcttaacccttcgctcataactgcctcccgcgcttgaacaccagcaccacgaaaatcggcacgcccaccaacgcggtgacgatgcccaccggcacgatcacacccggcatgatcagcttgctggcaatcgacgacagcgccagcaacagcgcgccggtcagggcgctggccggcagcaggaagcgctggtcttcgcccaccaggatccgcgcgatatgcggacccaccaggccgataaagccgatggtgccgacgaaggccaccgcggtggccgacaacaggctgatgcgcaacaacgagaaaaagcgcaagcgtttcacgtccacgccgaagctttgcgcgcggtcttcgcccatgcgcagcaaggtcaggcgcggtgcggcggcgaaggaaaacggcagcaccaccgcgaccaccagcgccaggatgccgagcttgtcccagttggcccgggtcacgctgcccagggtccagaacaccagttgttgcagcacatcttcggtggccaccagttgcaacaaagccaccaccgcgttgcaactgaacaccagggcgatgccgaacagcaccaggctctccacaccggcgccccgtaggcgcgacatggcttgcagcaaaaataccgaggcggcggcgaagatgaacgccgagagggagatcgccgtgttggccgacacccacagggtcgtcaccgggaacacaatcaccagggatgcccccagtgccgccgccgacgacacgcccaaggtaaacgggctggccagtgggttgttcaagatcgcctgcatctcggcgccggccagcgacaacgcacagcccaccagtatcgccatcaacgcgtagggcaggcgcacgttccagatgatcacctggtcggtggcgctgaggtgggacgggtgcacaatcccgtcaagcaaggccagcaggcccatgccggacgggccgctggccaggtccaccagcagggcgcacaccagcgccgtgccgagcagcgccaatagccaggcacgccgcgcgagcaggcggcgatagccgtgggtggctgaggcgaggtcgagagtttgcgtggtcatttaggcgtgtcgacccaataggcaccctgcaacggcatccccaggaactgctggttgatctgctccatggtcgcctgcgggtccagcttggcgaactgttgcggatgcacccacttggccaacgattcaatcgccagcaggttgtacggcgagttgtagaagtcatgccacaggccgtgggcgttgcctgcgcggatggcacgcaggttggcgaactcggggcgcgccaatacgcggtcgaaggcttcacgcgcctcgtcatggctcacgccggcacccaggaccagtcccggtttgtggttgccggtggcgacatacacatccggatcggctttcaaggcgtactccacgctgatatcccccagtgcccccggcaccacatcggcggcgatgttgcgcccgcccaccagcttgatcacttcccccatgccgctcttgcccgtggtgtgccccggcgcttgccaggcgccggccagcagttcgaggaacacgctcggacgcgagccggccggcaaggtggcgaccgcgtcggtgataaccttgaggtgctggtcatagaagtccaggaaagccttggcctgggctgcgcgccccagcgcctggcccagcgcgttcatgctggtgtgggtgccttgcaccgggttgatgcgaaagtcgacgaacagcaccgggatgcccgccttggccagcacatcggcgaccgggctgtgttcggtcgggccgtggccggaaatgctgaacactgccaggtcgggtttgagcgagaggatttcctcggcgctgacgctttgttccgacgcctggccgatcagggggatgtctttgaccgtcggaaatttcgccacgtaggcgttataggtgtgctggtcgagcagcttcaaatcgttctgccaaccgacgatgcgctggaacggcgcatcgcggtccagcagggcaaacgccgaaatcaagcggccttcaccgagaaccacgcgcttgacgttgtccgccacctcgaccttgcggcccagcacatcggtgacttcatgggcggcagcggtctcggcatggccaagaaccaacgcggcgaacagtacgcccagcttgaacacattacggggtttcagcatggcagggactccaggtgaaggcggcgcatcaggtattgctccagcgccgcaaagggttgtgaggcagggatctcgatcagcacggttcagaactcgtagtcgacgctggcggtgagggtgcgcccggcgcccggaatgccgtagagctggaagccatcgagggacgcgccgacctggctgtaatagaacgtgttgaacacgttgttgaggttgaggttgaccgtggtgtccttgttcaccttgtattgcgcggccaggttgctcacccagtagccaggggctttttcgtggtcgcgggtgtagatcgcgtagaccccggacgggccgttggcgtagctgctgttgttgttcaaaccgccgacgtacttgttgtcggtgtagcggcgccggcccacttattgctcgccgtagctgaggctcagggcgtcggtgacggcgtaggtggtccacaggttggcggtcaggtccgggacgttcttggcttcggcgcctttgttgatgcctttggtctgggtgctcttgagggccgagaaaccgctgtaggcggtccagcgcggggtgatattgccttgcaggcccagctcgatgccgtcgacgcgtttggcgggcagggcgcgtaccggggcggattcgccgtcctggtattcccaggcgttgtccagttcggtgcggaagatcgccgccgtgacgttgagcctgtcgtgggcaatgtcccacttggtgcccagttcataggtcttggatttggccgggctgtaattgctggtgctggccgcgccgtagatctggttgttggtggacgcgcccagcgccgacggttgcgcggcctcgctgtaagacacgtagatactgccgttgggcaacggcttgaacaccgcgccgacccgaccgctgaccgcaccatcggtgctgctgatcgtcgcctggccgcgttggcgggtttcggcacgccagttgtcgtagcgcagcgagccgagcacttgccactgctcgttgagggtgatggtgtcgcccaggtagagaccggcgttgtcgatcaccgagcgcgggtcgccttcgcctttggtcacgtaggtgctggcgaagctgtggctggggtcgtgcatgtcaaacagcatgttgccggccggcacttcggcgttgcgtttcaggccgccgtaggtctcgtgatagaactccaggccgctgaccaccgcgtgctgcaggctgccggtggtgaggttgaaattgaagtcggtctggttgtccaggatggtgtagcgcttggacaaaccaaagtcgctgccgcgcaggatgccgtagccggtgttgctgttgttcacgtagtcggtgtaggcattcaccgtactgccgggcacttggctgatcgggcctacgccggtgtaacccaaggtcgcacagcgggtgccggtgcaggtcttctggccgttggcgttggcggcgaagaagcgcgccggcgagagcacggcgaagttgtcgctgcgttcccagcgcgtctggttgcgcaggttggcgtcgttccaggcgaagtcatgctcgaagcgcgccgtgagcgaggtggttttgttctcttgggtatagaggcgggagtcgccgtaccagttggagcgtttcacgcccggcatgcggtcgccgttggtaccgcgctggatcggtacaccgccgtccggggtgttggtgtctttctggtagaaggtgtcgatgaacaaccgcgtgtcggtgcccaggccgaagccgaacgaagtagcgatgccccagcggtcgtagtccacatcgtcgcgctcggccacctggttgtagtgcttcatcaggttgatacgcacggcagtggtgtcattcagctgtttattcaggtcggcagtgaggcggcgatagctatcggtgccgatcccggccgagactttgttggcatcgcccaggtgcgcttccttgctgaccaggttgacgctgccacccacggccgagactccggactcgatggagccggtgcccttgaacacttcggcctgttgcaggttgaaggtgtcggtgcgcgtggacatgccggcatcgcgcacaccgtcgacggtcaggctctgctcggaagaaaacccacggatcgaaaacagatcgccccagcccaggttgccctcgccggacataaaggtaatgccggggacattgcgcaacacttcctgcaaggtctgtgcgttctgctccttgagcacctgttgcggcacgatggttacgctttgcggtgcgtccagcagcggctggctgattttggccgaggtgacgcggtccaccttgaaggtggaagtggcttcgccgtcgacctggatttccggcaggttcaacaccgaatcgccggacgtggcggttggggcgtcagccagggcaaccggtgcgacgccgccggccgccagcaaaccgaacatcggggccagggtggtgtgcagcgtgtggcggtgaggcgtgggcaaggataggggcaatgacatggtaacgtccgagtctaaattacaattactctcatttaggttcggtagtctaaagagcgattccgcctgccataccccgggtttgtatcgctgatgcgtgattagggtttcctacaacattccattacatttgcctgcgctgctggctgaactttcggctatttgctgcgtttcatcgtttttcggattgactgcccatggccaagcaagaccacctgctgatcgttgatgacgacccgcaaatccgccaactgctctgcgactacctgagcgacgccggcttccaggtgtccaccgccgccgatggcaaggaaatgcgccgccgcctggcgctgaatgtcatcgatctgatcgtgctcgacctgatgctgcccggcgaagacggcctgagcctgtgccgcgaactgcgggtgaactccaacacaccggtggtgatgctcaccgccaagggctcgttgatcgaccgtatcgtcggcctggaaatcggcgccgacgactacctgcccaaacccttcgacccgcgcgagctgctggtacggatcaaggtggtgctgcgccgggtgcagagttttcccgaccgcgcgcgcctggatgaagcgccgagcattcgttttgccggctggcagctcgacacacgggcgcggcaattgctgtcgccggagggcgtggtggtcagcctgggcaactcggattaccgcgtgctgcgcctgctgttgcagcaccccaaccgcccgttgagccgcgattttctgctcaaccacgtgttcgacaaggacagcacgccgttcgaccgctccatcgatgtgtgtgtcagccgcctgcgctcgcaactgccggcagggttgatcaagaccgtgcgcaacgagggctacatgctcactgccgatgacgtggtgctgcaatcgtgagactgctgccgcgttcgctgttcgggcggttggtgctgatcctggtcagcggcatgcttgcggcgcaggccctgaccagcagcatctggtacgaccggcgccacgggcaggtgctggaaattcccgcgcggttgatcgccacgcgcctggcggacgtggtgcgcctggtgcacagcgatccgcagcaggcagatgtgctgatcaaactgctcgacacgccgaacttccgcctgagcctcagtgatcaggccagcaacaccccgagcaccctgcacgacagcgaccgcccgaccgaacggctgatcaagaaggtgctgtcggaaaaaaccggttatgcccagagcctgatcctgttgcgcttggctttggtcgatggcgatgggcagaccgccgggctgtcgaccctgctcggctccaagccggtggtggggcaatttttgatcgacctgcgcctgcccgacggtcgttggttgcaggtggatgccagtgaggaacagggctggaccagcacctcaccgttggaccttttgttcgattacgtcatgcgcatttatttgctgcgggtgttggtgctggtgctgatcgctctggtggcggtgcgcctggccatccgcccgctcaatgcgctggccaaggcggccgaagcgctgggccgggacatccagcgtccgccattgtcggtggacggccccaccgaagtgcgccgcgccgcccaggcgttcaatgccatgcagcagcggctgatcgccaatattgccgagcgcacgcgatttcttgcggccatttcccacgacttgaggtcaccgatcacacggctgcgtctgcgcaccgagatgcttgaggacactcgcaccaaagagcgttttcgcagcgacctggaagaaatggagcacatggtctccagcacgttggattttgtgagcagcggcgaaatcaacgagacgcgacagaacatcgatatcaacgccttgctgcaaagcctgcaggcggacctacaggacgttggcgaacaggtggtgattgagggccgggcgaagcagccattgcccgggtatgcccgcagccttaaacgttgcgtgcagaacctgatggagaacgccgtgcggtatggccgtgatgtggtggtgcgggtcgaggacaaggcggacagcttgaagatcgtcatctgcgatcgagggccggggattccccaggaacagttggagcaagtaatggaaccgttctatcgggtggaaggttcgcgtaatgccgagaccggcgggtatggcttgggattgagcattgcccgcagcatcgccaaggcgcatggcgggcgattggaattgcgcaatcgggaaggcggaggccttgaggtggaactggtgtttcaacgcaaatcctgaatgtggaacgcaactgaatgtgggaggggcggtgcgacgattcgacttgcccccgattgctggctgtcaggcgctgaataggagactggtataccgctatcgggggcaagccccctcccacatttaaatcttcagcgtggctttacgccccgtggcacttcttgaatttcttctcgctgccgcacgggcaaggatcgttgcgacccacgtccttcagggcattgcgcaccggctcctggtgagcgtggccgcagttcgggccgtggacatggccgtggtcgtgatcatggtgatcgtgatcgtggttgcagtcaggaccatggacatggggttgctgagtcatcgatgtcgctccggaataaaatcgccggggattatctcgccattgtggttcacctgcacgtcataaccgatgaataatccggttttcagctcgccttcgaggcgatagggcacggggcggtcgggttttttcagcatctgcaccacatcgcggatctgcggccagaggttggtgcgcaccgacaccttgaaaaaggcatggccgcgtggcggcaccgtgagccattcgttggactcgccctcggtgagcacaaagtcatccagcgtcaccttgtagatcaggccccgcacggtcaggtcggcgtcgtcgcggttgtccacgcgaaagtacagcttgaatttctgctccagcagcttggcccgtaccacttcgacctttaccagggagacgtggggcggcggcgcgtcgtcttcgaaccacgacgcgcagccggtcaggccaagggttaacgccagcatcaagctgtagatccggagcatggcgtgagtcctgtggtggttagagatagctggaacaacacttcttgaatttttgcccactgccgcacaggcaggcatcgttgcgtccggccttcacttccacggtcgggtcgatgaagtaccagcgcccgtcattctgtacgaaagaagactgctcgcggtggctatgttcaccggtgctgtcatgccagcgcgcggtgaaggtcacgaacgcgtgttccggctggccgccgaacacctcggagctttctacttcaaggccgagccaggtgctctgggcactccaggccgcaatggcggcacggtccaggccgggctgttgcgcgggcagcgtggtggcaaccagatagtccaccaggccgagtacgtaggcgctgtagcgcgagcgcatcaacgcggttgcgcagggcgccgggtgcccggcgtgataatggccgcagcaggcatccagcaggttgccactgccgcaggggcaaatggatgtactcatcgggttaccaccaatactttccgaagttttccgggttcgcccagaagcgggcgttgagccagtccggcacttgtttatagtcaagcagatcgtaggtaaacagcgtcagaacctgctcgtcgcgctggaaacgctcgccggcctgcagggccagggagaagaagtcggtgtccttccagtcgcagtcacccaggtccaccagcaccgcaatgcggctggcattgaggttgcggatgccgccgagcagggtcaggccttgcggttttgacaggtgctccaggcagtccaccaccagcgccaggtcaaaacgctgcgccgccagctccgccgacagtgggccgggtggggcaagagcaacctgggtgtcggggtgtgctgcttgaaaagcttccagcgccgggaactggctggcgcccaacagcaacaggcgtttgggctggtgcaggtcgagcaaggcggccagggcctgctggggtgtacggtcagaaataccggcggtcatcagagatcctcacatcaggaccgtagagactagcgcggctgagcgtgcgggcctagagcgggcggtggcgaaaagtcctacgagggcgatgatcctcaatgaatacgggcgcgcggcgtagtggcgcagatgaaaagagccgtctttactccactcatcggcccccgccgatcccctcaggagaaactcaatgagcatcatgcggacagctctacccttggttctgctaaccggagtattgacaggttgcgcaggtttgcaaaaaaccgattggcccacctgtgccgccgttggcggtgtgaccggtgcggcgatcggtgccactgaaagctcggcctatgcgggctacggcgcgttgttggtcggcggtatggccggcgcctattgctgggtgcatggcgacggtgacgaggacggcgacggtgtgccggacagccgtgacaaatgcccaggcacgccaaaaggcgtgcaggtggatgccaatggctgcccacccgcgccgccgccggctgtggttgaggaagtggtggtggtcaaggaagaaaccattgtgatccgtgacgtgcacttccagttcgactcagccatgttgacggcggcggataccgccaagctggacaccgtcgctacccgcctgaaacaggaagccccaggcgctcaactacgggtcagcggtcacaccgacagcgtcggtaaagacgcctacaaccagaaactctcggaaagacgcgcgcattcggtggtcgagtacctgatcaagtccggtgtgccgcgcagcagctttgtatcggtgaccggtgcaggcgagagccatccggtagccgacaacaaaaccgctgaaggccgtgccttgaaccgtcgtacggaaatccagatcaaccgctgacggcccttgcccctgtggaatcccacaggggcaatactgccgatcctcccctttattaacttttttgatccttcactggcaaagcgcctgcggaagtcgttactgtgcgtccaaagaaaaactagaaatattttttgaaaaaattcaggggagctccatgatgcgtaaggtttttctgttggccctgttggtcagccccgttgccctggcccagagcgtcagtgttgaacccaactcgttgatgcgcctgcccaacagcaccagcgtgttgcaattggagcgcctggaggtggcggactacggcaccttgctgatccccgccaacatcagccaggtcagcgtggatgagttgcgcctgggccgcgacgcccgtatcgccattgttcccggcaacaccgcgctgcaattgcaggtgcatcatgcgcagttggatcacggcagccagatcacctcccgcggcgctcccggcacccacgaaaaaccagccaaggccgggcgtgacctgaccctgcgcatcaattccctggcggcagaagaactctcggtggatgcccgtggcggcgccggtgcccaaggttatgccgggctggacggtgccaatggcgtggatccgggttgcacctggggctcggccggtcgtggcgccaatggtgataacggcggcgatggcttgccgggggcgtcgggcgcgcaggtacgggtcgagttgccgcaggatttcccggctgaccatatcaaggtttgggtcgacggcggtcccggtgggttggccggtacggcgggcaagcctggcaagggcggccagtccaaaggctgcctggtgtatcgcgccgatggcggcgagaaaggccgtccaggcttggaagggcagccggggccggcagggcctgcggggactgtgaccatccagcggctttgaattgcttgctctgacgccatcgggggcaagccccctcccacaattggaatgcattccaactgtgggagggggctt

SEQ ID NO: 69 - DNA, 104519 bp, Pseudomonas nodulensis
  misc_feature (64263)..(64298): n is a, c, g, or t
caagccccctcccacaattggaatgcattccaactgtgggagggggcttgcccccgatggcgatatatctatcgcctcagaacatcggccgagccgaagcaatcgccaccaccaccaaccctacaatcaagttgatccccaccaaccggcgaatctgccccagcgctgctgcgcccgccggccaatcctcagccgccactgccttgcgcagttccggcaacttcagcgcctggatgcggataaacaacgccgtcatcaccagatacaggcccatcatcacctgcacataacgcggtgccgtctcaaacccgttgaagcgcaagtgcagcagaccaatgccgctgatcggcaaaaccgccacggcgatccacacccacacgaaaaaacgttgaaacacatttacccacagcttgagccgggcagggccttcaagtgccgccacagcggcggggcgcaggatcatccaggcgaaaaacataccgccgacccatatcagggcggccaatacatgcagggtgtaagcgaggctaaacgcggtcattgtggtactccgttctgcgcgggattcattagcggggtatgatagccgccgatccgaaccactgaaaatttatccagcgttttttgcgcccgactatccatgatcagcactgaactcaaaaccacgatccagggtgcctattcgcgttttctcgaagccaagagcttgaaaccgcgctacggccaacgcctgatgatcgccgaagtggccaaggtcctcggggatatcgacaccgacgacgaaggtcgccgcgagggtgagcccgcggtcgtggccgtcgaggccggtaccggtaccggcaagaccgtggcctacagcctggccgcgatcccgaccgccaaggccgccggcaagcgcctggtgattgccaccgccactgtcgccctgcaggagcagatcgtctacaaagacctgcccgacctgatgcgcaacagcggcctgaacttcaccttcgccctggccaaggggcgtggccgctacatgtgcctgtccaagctcgatgtgctgttgcaggaaggtcacgcgcaaactgccactgcccagctgttcgaagaagaaggcttcaagatcgaagtcgatgaggccagccagaagctgtttaccagcatgattgagaaactggccggcaataaatgggacggtgaccgcgacagctggcccaccgccctcgaagattccgactgggcacgcctgaccaccgaccacagccaatgcaccaaccgtcattgccccaacttcggccagtgcgccttctacaaggcccgcgaaggcatgggcaaggtcgatgtgatcgtcaccaaccacgacatggtgctggccgacctggccctgggcggcggtgcggtgttgccggacccgcgcgacaccctttatgtgtttgacgaaggccaccatctgcccgacaaggccatcggccatttcgcccattacacgcgcctgcgctccaccgccgactggctcgaaaccaccgcgaagaacctcaccaaattgctggcccagcacccgctgccgggcgacctgggcaagctgatcgaacaggtgccggagctggcgcgggagatcaagacccagcagcaattcatgttcagtgcctgcgagcaggtcgccgacttcaagcccggtgaggatgtggaggggcgtgagcgtccccgccatcgttttgtcggcggcctgatccccgagcatatgcgcgaaatgggcatcgagctgaagaagggcttttcacgcctgactgacctgttcacccgtctcacggatttgctcaaggaaggcatggacggcgaggtcaacatcggcatcgccagcaaccaggccgaggagtggtacccgctgttcggcagcctgctgtcccgttcccagggcaactgggagctgtggaccgccttcaccgtcgaagacccggaagacaacccgcccatggcgcgctggctgaccctgtcggaaagcggtgcgctgttcgatatcgaggtcaacgccagcccgatcctggccgccgaaatgctgcgccgcaacctgtggaacgtggcctatggctgcctggtgacctccgccacgctgaccgccctgggcaccttcgaccgcttccgcatgcgcgccggcctgccgaaaaaggctgtcaccgccgtggtgccaagcccgttccatcacgccgatgcgggcgtgctgcgggtgccggacctcaaggccgacccacgggacgcagcggcgcacaccgccgccatcatccgtgacctgccggagttggtcgaaggttcgcgcggaacgctggtgctgttctcgtcacgcaaacagatgcaggacgtgttcgatggcctcgaccgtgactggcgcaagcaagtgttcattcagggcaacctgtccaagcaggagaccctgaacaaacacaaggcgcgtgtagacggcggcgactccagcgtgctgttcggcctggccagcttcgccgaaggcgtggacttgccgggtgcctactgcgaacacgtggtgatcgccaagatcccgttctcggtgccggacgatccggtcgaggcggccctggccgagtggatcgaggcgcggggcggtaacccgttcatggagatctcggtgccggatgcttccttgaagttggtccaggcttgcggtcgcttgctgcgtaccgaagaggaccggggcaccatcaccttgctcgaccgccgtttggtcacccagcgttatggcaaggccatcctgaatgccttgccgccgttcaggcgcgaaatttcttaagccactgtgggcgttttcgcccacttcgtggtctatctcactgtatttcatcaggccattcatcggccgtctgggagaaccttgttcgtatgattcgcacgctgcccgccgtttttgccctgctgtttgccgcgcccttgatggccgcgcccgctgggcaacagactttgttcaacttcgtccggcctgccgatgtggtcaaggtggcgaccctggacgccagcctgccgcaatacaacgccgaacaaacccctgagggcgaagtgctgcgccgcatcacattcaacccggccgccgaaccgagcctggtgctgagcccgcagaccggcacctgggactggtcccagtcgggtgccatgagcctgcgtatccagagtgcgatggactgggcattgaccctctacgtcaaggtgcagagcgcggatggcaagaccctggtcagccgcatcgacctgccggccggcccggcccagaccttgctggttcctctgcaggccaactcgccgctgagccagggcatgaaggccggcccaccgatgccgatcactgtggacggccagcgtgtgctgctggccagcagtgcaggcgaaatcgaccgcagccaggtggtgtcggtgacggtgtcgatgctcaagcccaatgccgcccaaagcatcctgctggagcgctttggcgtgcaggacagcgagccggtgctgaaggcggcctacagcgagctggtggacgcctatggtcaatccacccgtgcgcggtggccggaaaaggtcagcagtgacgaacaactcaaggccgccgccgccaaggagcaacagcagctccagggctggctggccacgcgggataaatccgctttggatcaatacggcggctggaacaaaggcccggcattcgatgccagcgggtttttccgtaccgagaagcgcgatgggcgctggtacctggtgacgccggaagggcatccgttctactccctgggcgtcaataccgtggccccggacaacagccagacctatgtggccggccgtgagtggatgttcgccgcgctgcccaagggcggcgaaccgttcgataagtactacggcagcggcgacaaccgcagcggtaacggcgcgggggaaggccgtggctttggtgccgggcgttggtatgacttttacggcgccaacttgcagcgcacctatggcggtgatggcttcgaccagaaacgctgggtcactcacaccctcgatcgcttgcaggcctggggtttcaacaccgtcggcaattggagcgacgagagtctggccaccgctgaccgggttccctacactttgccgctgtcgatcgtcggcgattacgccagcatcagcaccggcactgactggtggggcggcatgcccgacccgttcgacccgcgcttcgccatggccaccgagcgcgccgtggcgattgccgcccgtgaccaccgcgatgacccgtggttgatcggcttttttgccgacaacgagctggcctgggccggccccggcgatgatccgaaatcccgctacgccttggcgtacggcacgctgcgcatgaccaccgacgtgccggccaagcgcgcgttcctcaagcaactgcgcgacaagtaccgcaacgaagaaggtttgtcgaaagcctggggcatcgagttgaagggctgggagctgatggaggacccgggcttcgaaccgccgatgccgaatcccgagcacccggaaatcgaggcggacttcaaatacttccagaagaccttcgccgatgcctacttcaagaccatttccgactcgttgaaatggcatgcgccccatcaactgctgctgggcggccgttatgcggtcagcacgccggaagccgtggcctcctgtgcgcaatattgcgatgtgttgagtttcaatatgtataccctcaaaccccaggacggttacgacttcgccgcgttgcgggcgttggacaagccggtgctgatcaccgaattcaacttcggctcggccgaccgtgggccgttctggggcggcgtgacgcagttggccagggaagaagatcgcggcgcggcgtatgccaacttcctcaagcaggccatggccgagccgtcgattgtcggcgtgcactggttccagtacctggaccagccggtgaccgggcgtctgctggacggtgagaatggccactttggcctggtcgggattaccgacgtaccgttccagggttttgtcgacagcgtgcgcaaaagcaacctggcagccgtcgaccaactgggcaaggaggcgcaaaaggccaaagcggcaggcgccgtgcgtgaaagcgaaggtggcagggccgggcatgaaggcaaaggcccggggcagggcgccgggcatgcaggcgggcactccgggaatggtcattgattgagcgctgacgggttcacaaaacccaccagggctggaacaatgtcggccacttttttcgatgttttccgagggcgctcaggtgcagatccagggtcattacgaactccagttcgaagcggtacgggaagcgttcgccgcgttgttcgatgacccgcaggagcgtggtgccgggctctgcatccagatcggcggcgaaacggtcgtcgacctgtgggccggcaccgccgacaaggacggcgccgaggcctggcacagcgacaccatcgtcaacctgttctcctgtaccaagaccttcaccgccgtcacagccctgcaattggtggccgaaggcaaattgcaactggatgcgccggtcgccaatgactggccggaattcgccgccgctgggaaagaagccatcaccctgcgccagttgctgtgccaccaggccgggttgccggcgatccgcgagatgctacccaccgaagccctgtacgactggcaattgatggtcgataccctggcggcagaagccccttggtggacgccgggccagggccatggctacgaggcgatcacctacggctggctggtcggtgaattgctgcggcgtgccgatggtcgcgggccgggagagtccatcgtggcgcgggtcgcacggccattgggcttggacttccatgtgggcctggcggacgaagagttttatcgcgtggcccatatagcgcgcagcaaaggcaatatgggcgatgaagccgcgcaacgtttactgcaagtaatgatgcgcgaaccgacggccatgaccacccgtgcatttgccaatccaccgtctattctgaccagcactaataaacccgaatggcgccgtatgcagcagccggcggcaaatggtcacggcaatgcgcgcagcctggcgggtttttatagtggattgttggacggtagtttgctggaggccgacatgctcgaacaattgacccgcgagcacagcatcggcccggataaaacattattgacacaaacccgtttcggcctcggctgcatgttggatcagccgcagttggccaatgccaccttcggccttggcccacgtgcgttcgggcatccgggcgctggcggttcggtggggtttgccgatcctgaacatgatgtagcgttcggtttcgtgactaatacactcggaccttatgtacttatggacccgcgggcacagaagttggtcagaatattggccggttgtctgtaaaccccttgctgtttcacgtttttttgttacaaaggcaactataagaagacgctgtaggaatagtcgtaactttattcatctacaagcgtctgtttaacggatcatttagatccctggttttttctcattttgtggatatctcatgttatcgaacaagtccttggctcttgcgctatgcctcactattaccggttgcgcacaaactccacaaaatgatgccgagggcgggcattggtggtcatttggatccgataaggccacgaccaaggacgcagtgacccaagccgatgccaagccggaggctaaaccggacgccaagccggctgccggcgccaagcctgccgcaccggtagccgctgcggctgctgcgccaaccccggctccagccgccaaggctgacaccggttccagctggtggccattctcttccaagaccgccgacgaaaaggctgccgatgccaaggccgacctgaaagccgacctcaaggccgcagaacctgcaccagcggttgccaagaccgacaccgaaacccattggtggtggccgttcgaaagcaaacccaaaccattggccaaggtcgacgtgaccaacgtgccgatgcccgacccgaaaatcacccaagcctggctggacgactatgagccgcgtctgcgcgcggccatcaaggacagcaacctgcaactcgagcgtcgcgataacgtccttgtggtgattgccccggttgatggttcctacaacccgaaacgcccggccatgctgctgccggtcaccctcggtccgttcacccgggttgccaaggcggttgaagccgatccgaagactgccgtgctggtactgggccacgtcgatgccaccggcaccgccccggccagccaggcgctgaccaaggagcgtgcacagtccatcgcctcgatcttcagcctcagcggcttgaagcaagaccgtctgatgctgcgcggcatgggcgacctgatgccacgtgcggccaacgacagcagccagggccgcgccctgaaccgtcgcatggaaatcatgttcacccagcgcaccaccatgctggcgctgctgagcaagtatcagtcgggtaaaaccccgcctgtcgccgaaatggttgcggtgcaggacgttccagccccggctccagccgccaaggccccggccaagaaagcttcgaccgccaagaaagcggctgccaagccagcggccaagaaagccccggccaagccagcggcgaaaaaagcggcacccgccaaagccaaggccgctgcaccggcaaacgaccaggcgaaaaactgatccgctgaaccagaaggataaagctgcatgacccaggcactggccgatatgcgccgtgactacacacgggatggcttgagcgaggcccaggccccgagcgagccgtttgccttgttccaccagtggtttgccgacgcggtgaaaaccgagcagccaccggtggaggccaatgccatgaccttggccacggccgaccaggacggtcgcccgcactgccgcatcctgttgctcaagggcctggatgcgcagggctttaccttcttcaccaattatcagagcgccaagggccaacagcttgcggcgcggccgtttgcagccatgacgtttttctggccgaccctggagcgccaagtgcgcattgagggtcgggtggtgaaggtcacgcctgaagagtcggatgcttattaccaggttcgtcccttgggcagccgcctgggggcatgggcgtctccgcaaagccaggtcatccgtgaccgggaagagctgcaggacctgctcaaggctaccgagcagcgtttcagcgatacccagcctgactgcccggagcactggggtggctatcgcctgttacccgaacgcatcgagttctggcagggccgtgccagccgcttgcatgaccgcctgaactatcgcctgcaaggggccgactggacccgcgaacgcctggcaccctgagctgcacctttcgtcactccgcttgaatgatgcctgtcaccccgacgtctctattgaagaggcgtcgggcgtgtactgctgcgccgcggtcttcagccagtgaggcaagtcggaccgtttgattttcaagctgcgagccttttccagctgttgcagcatgaaggtgcacttgtgcaggtcattacctgccagcgacagggccaggtcacggtctatccaacgtctgatgcgcaggtacaaccagccatggaaatacagtcccgcaagggttgtgactacaatgatgaagtaatccatgaagatcccggttgagagaacagcgctaccgttcgtctgtttttctggtgtgggcagtctgtactaaggctgaatgaaagcaattttctgcggtgcttgccgtgacaggcgtcaagctgcagcgtttaatgaccacctgtcctttggagttgatgctatgcgtaagtctgttttactggttgcctgctttaccaccctgtctttgctgctgggtggctgcgcctcgagtctgaccggcgactcgtactcccgtgacgaggcgcgtcgtgtccagaccgtgcgcatgggtaccatcgaatccctgcgtccggtgaaaatcgaaggcaccaagaccccaatcggcggcgctgcaggtgcagtcatcggcggtgttggcggcagtgccatcggcggtggccgtggcagcatcgtgaccgccgtgatcggcgccgtcgccggcggcctgctgggctctgccaccgaagaaggcctgacccgcacccagggtgtggaaatcactgtccgcgaagacgacggcagcatgcgtgcctacgtgcaggctgtgcaggaaaatgaaatcttccgcatcggcgaccgcgtacgcatcatgaccgttgacggtaccagccgcgttactcgctaaacgtcgggtgtagaaatacaaaaccccaaccgggtgactggttggggtttttggttttcgaggctgtcaaattcaaacctgaggtgcggcctttttacgactcgccattgccgtcaccgcatacccaatacacgccgccaatatcgacccggtcaaaatccccatccggtcttccccggcaaactcactggcccccggtacgaatgccagcgagccaacgaacaggctcatggtaaagccgataccgcacaggatcgccacgccaaacacctggccccagttcgccccgctgggcagggcggccaggccagtcttgatggccagccaggtaaggccgaacacaccgatggtcttgccgatcagcaggcccgcggcgatacccatgggcacgtggtgggtgaagctttccaggctcacgccggtcagggacacgccagcgttggcaaaagcgaacaacggcaggatgccgtaagccacccacgggtgcagggcatgctccagcgtgagcagcggcgagggctcggcgtttttggtgcgcatcgggatgcagaacgccaatgtcacaccggccagcgtcgcgtgtacgccgctcttgagcacgcatacccacaggatcagcccgacgatcaggtacggcccgagcttgatcacgcccaggcggttcatcgcgatcaacgcaatcaggcaggcgcccgcacccgccagggcggcaccggacaaatcggcggaatagaacacggcaatcacgatgattgcaccgaggtcgtcaatgatcgccagggtcatcaggaacagcttcagcgacaccggcacgcgcttgcccagcagggccagcacgccgagggcgaaggcaatgtcggtggccatgggaatcgcccagccggaaagcgccgcagggtagtccttgttgatcgcccagtagatcagcgccggcaccaccatgccgccgatggcggctgcgccgggcagtaccacttgcgagggcttggacaggtggccgtcgagcagctcgcgcttgacctccaggccgatcagcaggaagaacagggccatcaggccatcgttgatccacagcagggcgggcttggcaattttcagcgcgccgatctgcgccaccaccggtacatcgagaaacgcgctgtacaggtgcgacaaaggtgaattgttgatgatcagcgccaaggccgcagccgcgatcaacaacagaccgctggcggcttccagctggaagaaacgggtgaaagtgctacgcagaggcaagggatgctctccaatccaggttcaataggtgggtaccctaacccgtaccgttagttgttaaaacaaaagttatattcttatttgttataagaggctggctggggtgatgttgcggctaagcctagcaattgtgtgtccgattgcgtcggtactgtatctgtgtggtctgtaggaaaccccctaaaatcagggctgacaccttcagagaaactctccatgagcgaccaccgtccctgggcccgcgaagccattcgtatcattgaagcagacttccagcgcagcgccgacacgcacctgattcccttgccgctaccaggcttgccaggcatcgagttgtacttcaaggacgagtccagccatcccaccggcagcctgaagcatcggctggcccgctcgttgttcctgtacgcattgtgtaatggctggctcaaacctggcgcgccggtgatcgaagcgtccagcggctcgacggcgatttccgaggcctactttgcccgactgctgggtttgccgtttattgcggtaatgccggctaccacgtcccaggaaaaaatcgcacagattgccttctacggcggcaagagccacctggtacaggatccgacgcagatctacgccgaatcagaacgcctggcgcgagaaagcggtggtcatttcatggaccagttcacctacgccgaacgcgccactgactggcgggcgaacaacaacatcgccgagtcgatcttccagcagatgcgtttcgagcagcatccggagccgagttggctgatctccagccctggcaccggcggcaccaccgccaccctcggtcgttatgtgcgctatcgccagcattgcacccgcgtgttgtgtgccgatgccgagcgttcggtgttctttgatttctaccagagtggtgatgccagcttgcgtctggactgtggttcgcggattgaaggcattggccgaccacgggtcgaggcgtcgtttttgcccaaggtcatcgatgcgatggtcaaggtgccggacgcgctgtcgttggcggccatgcattacctggctgaacggctgggacgacgggttggtggttccagcgggactaacctgattggcgccctggtggcggcgcagcagatgaaggcggcaggagagtcgggatcgatcgtggcgattttgtgtgatggaggtgagcggtatgccacaacctattacgaccaggcctggctggcggggcagggctatgcgttggacggtttgattgcggctgttgcagccagtgtcgaacagggcgagccgttgccggacagcatcctgcgcgcaaacatttaaccttgtaggagcccggcttgccggcgatggcgatcttgaagacgccatcgccggcaaggcaatgtgtcaggcttccaggcccaacatatcccgagccaacgcctcggcaatccgaatcccatccacgcccgccgacagaatcccaccggcataaccagcaccttcaccggcggggaacagtcctttcacgttcaaactctgcatcgattcgttccgggtgatccgcaacggtgatgaggtgcgcgtctcgatgcccgtcaacaccgcgtcgtgcaacgagtagcccttgatctgcttctcgaacgctggcaacgcttcacggatcgcttcgatggcgaagtccggcaaggccagggccaaatcgccaagagacacgcctggtttgtaggaaggctccacgctacccatcacggtggaaggcttgccggcgatgaaatcgcccaccaactgtgccggggcttcgtagttgctgccgccgaggatataggcgtgggactccaggcgttcctgcaactcgatacccgccaacgggccgcctgggtaatccacctctggggtgatgccgaccacgatgccggagttggcgttgcgctcgttgcgcgagtattggctcatgccgttggtgaccacgcggttcggctcggaagtcgccgccaccacggtgccgcctgggcacatgcagaagctgtagaccgagcggccgttcttggcatggtgcaccagcttgtagtcggcggcaccgagtttcgggtggccggcgtatttgcccaggcgcgcggcgtcgatcagtgattgcgggtgttcgatacggaaccctaccgagaacggtttggcttccatgtacacgccacgggagtggagcatgcggaacgtatcgcgggcactgtgccccagggccaggatcacgtgtttggagaggatctgctcgccgccatcgatgacgacaccgttcaactggccgtcttcgatcagcacatcggtcactcgttgctcgaagcgcacctcaccgcccagggcgatgatctgctcgcgcatgttttccaccacgccggtcaggcggaacgtaccgatatgcggtttgctgacgtagaggatttcttccggcgcaccggccttgacgaactcgtgcagcactttgcggccgtggaatttcgggtccttgatctggctgtacagcttgccgtcggaaaaggtcccggcgccgccttcaccgaactgcacgttggactcggggttgagcacgcttttgcgccacaggccccaggtgtccttggtgcgctggcgcacttccttgccacgctcgaggatgatcggcttgaagcccatctgggccagcaacagcccggcgaagatcccgcacgggccaaagccgacgacgatcgggcgttcggtcaggccttgcggtgcatggcctacgaccttgtagctgacatccggcgccgggttgacgttgcggtcatcggcaaacttgagcagcagggcggcttcgccctctacgttcaagtcgatggtgtagatgaagcacagctccgacgacttcttgcgcgcatcgtagctgcgtttgaacagggtgaaatcgagcaggtcatcactggcgatgcccaggcgctgcacgatggcaggccgcaggtcttcttcgggatggtcgatgggcagcttgagttcggtgattcgtaacatgacgggatccggtaggcggcgggcagagaggccggctgttttgcaaaccggcgattataagctccaatgaccgtttcccgtcatgttaaaacagcatggcgtcgcgtcagtcgtcgcgcgagccgccgaacgatgcgcaaccgcgctgtacctggccattgacgcgcaactcggcggtcatgtgctgcaaactgccactgaccgggtcgacacaacgctgcggcgctacccacaattccacgtgctgattgttggcctcggtcatcaggttgaagcggccgtcaccgatttgctcttccacataaggcacggccagtggcggctggccttcgcgatccagcaccaggcccttggcggtgacgttcatcacccaggtcggcttgtggccgttggcgcgcaggatcatgcgcttgaagtccgggtcgccgcaggccgaggtggagcgttcgacgcggtagagttgttgcaggtcgacgctgccctcggtgccgctggcaaccccggagaacttgccgcgcaggtcggcaaacaatgcgccttgctggccggccagggaggccgcttcctgcaggatgctggtgccaccggtgtcattgaccacatagttgcgtttgtcgttgcacggctggaacagcagtttgccgccgaccgcagtgagttcaccctgcatgcgggtcagcccggcgagcgacggcttggcaggatcactctcgaacatctggcaggcagcgaacagcggaagcagggcaaacaggaatagggtattggcggcacgcattatcgggtctccagacaagtgccgccacgttacgcaggccggcgctgcatcacaagcccatgacatagtttgacgcaggtctgcctgcggtcggatcaggaatattcgtacaggcgggtcgaggcatgtatgagagcgtcattttttcgataggagaaaggcgatgggctttcgacggtgtctctgtggttttttgctggtagcgagttctgcgctggctggcgagccggcgcgggtggagttttcgtccgccaccgattttgcggcaatcaccgttgacctcaagcaagacctggcgagcaacccgggcgttgtctgggtcgatgtagagttgagtccgcaggcgagggcgcgtctgaaggcgatctcgttgttgacgatcaaccaacgattgagcatttacgtcgacggccttgcgatgagtgcaacaccatctgtcgtcagaagtgttctggatgggttttacgtccgaatgggcgtccctcaagacttgttcatcaagtgggtgccttgggggcgccattagcggccgggaatcaacccacgataaacgtctgaccggtctgtaatccctccacacttttggcgtaggccaatgccacgtcggctccagcagccggtttgtagccacggaaatacggcgcgtagctgcccatggcctccaccagaaccgtcgggctgacggcgttgacgcgcaggccccgtggcagctcgatggcagcggctttgacgaacgcatccaatgcaccattgaccagtgcggccgaggcgccggtgcggatcgggtcgcggttgaggatgccgctggtgaaggtgaacgaagcaccatcgttggcgtactcacggccgatcagcagcagattgacctggcccatcagcttgtcacgcaagcccaactcgaaatcgctctcgctcatttcgcccaatgctacgaagtttacgctgcccgccgcacagaccagggcatcgaacttgccggtctgctcgaacagcttgcggatcgacgcgctgtcgctgatatccacctggaagtcaccgctgctgcggccgatgctgatcacctcgtgacgctgagccagttccgccttgaccgccgagccgacggtgccgctggcgccaatcaataggattttcatggtgctgttcctctaggggtaagtgaaggttcagtctagagtggctttttgcttggataaacgcactaataggcaacctttggttttcttttggaaacaatccatgagcgagatggatgacttggcggccttcgccgtgttgatcgaagccggcagttttaccgtcgccgccgagcaactgggctgtagcaaagggcaattgtccaagcgtatcagccagctggaagcgcggttctctgtggtgttgctgcatcgcaccacgcgcaagctcagcctgaccgcagccggtgcggccttgttgccccaggcccaggccctggtggtacaggtggatcgcgcccgtcaggcattggcccggctcaaggacgaccttgccgggccggtgcgtatgacggtgccggtgtccttgggggaaaccttttttgatgggctgctgctggagttttccaagcaatacccgcaggtgcagatcgagctggagcttaataacaactatcgagacctggcgcgagatgggttcgacctgggggtgcgctccggctccattgagaacgagcgcctggtggtcaagccgttgctggcctggcgtgagatgacctgcgccagcccggcttatcttgagcaacacggcgaaccggcgacgccagccgacctggccagtcatgcttgcctgctcaacagccactacagcggccgtgaagagtggttgtaccaccaacagcacgagttactgcgggtacgagtcagcggcacgtttgcctccaaccactacaacctgctcaaaaaagccgcgctggtgggggcgggtattgcacggttgccgtcctacgtgctgccggcggaattggcagatggccgactgcgttggctcctgcgcgattatcagacgcgcagcatgccgatgtacctggtgcatccttatcagggcggcttgccgcgtcgcacccaggtgttggccgactacctggtggattggttcaagcgcagcggcgaagccctggaccgcctttaacggtagcggcgagcgatcaggtgatcgatcgacaagcgacccgggcccttggcgaccagcaacagcaataacgcgagccaggtgccatgggttgggtaggcgtccgggtagacaaacaattgaatggtcagggtcatgccgaccagggccagggccgagaagcgcgtggcgaacccgacaaggatcagcaccgggaaaaagtgctcggcaaacgcagccaagtgcgctgcgacttccggcgatagcaacggcacatggtattcgctgcgaaacagcggtagcgtcgaggcggccaggcgcggttcaccgaattggaaggtgccgttgaccaggtctatggcaaagccttcgactttggtttgtccggatttccagaacaccgcggcaatcgaaaagcgtgcgagaaaggcgatcaggctgtagggaatttgctcgaaaagcgcgatgacctgattgatcaggcccgaagggcgagtgttcatggcgataccttttgttctggatgcaaatgagtaatggcgttgtggctgatcagcagcgccaggcattggtgcaggtcaaactcggcgccggcctcaagcgcgtgctccacggcgttttccaaggtcgcgccgcgggccaggttgttgatgaacgcgacagcatcaggggtgactgcgaataccttgacctccagaccctggcgcaacaccagggcactctgtggctgccagggatccaggttttccaggctcccctcggtctggtgtgccgcccacagcgctactactgcataggctgagtccagcgtggccagggaggggtgccattgcaggcgcagcccacccaggtccgtttgacttcgcagtgcctgtaatacggtctgttgatccaggggttggctgtctgccgcgtggtaggcctgtacccgcaagcgctccagccgggccatgtcggcgagataaggcacgctggctgccggttcgaacccctcgatgaagcaggcgaacgcgctaccgtacccgctcatcaatgggctggtgggcgggtgcgcctgtgcataaaggccggccatcgcgcggaaaaacgcatcgcccaccaactgcaacgtcacgggataagccgcagccaacgcgttgaccaatgagctgtgcacattgttgcggtacaccgcgaagcggctggctggctcggcgccattgctgctgaacaggccgtcggggcaaggcaggtccggtgccaacaaggccgcggtgaaggcgtcttgccggctcatggggtcacctgtgaaagatacctgtcagcttgccgggcctcggcttgcagcacgctgaacgcgggcaggtggttatcccgctcgatcagcgttgccactggaccgatgcgcgccagtaccgactcgtagagttgccacacggcgttatcgacaggggcgccgtggtcatcgatcagcaagcggtcgccaaggctgtcggtgtcttcggcaaaccccgccagatgaatctctgccaccgcgtgcaacggcaaggcatcgatgtaggactgcggatcacgttgatgattgatgcacgacacgtagacgttattcacgtccagcagcaagccacagccggtacggcggatgatttcgctgatgaagtcggtttcgtccagggtggagcactggaattgcaggtaggtcgacgggttttccagcagcatcggccgcctgagtgtgctttgcacctggtcgacgtgttcgcatacccgttgcagggtggcgtggtcgtaggccaggggcagtaggtcgttaaggaacaccgggccgtggctggaccaggccaggtgttcggaaaaggagtgaggttggtagcgctcgatcagtgccgccaaccgtgccaggtggtcacggtccggcggggcttcgccaccgatggacaagcccacaccgtgcaaggacagcgggtactgcgcgcggatcaaccccaggtaatgatgaaaagggccgccggccaccatgtagttttcggcgtgcacttcaaaaaaaccgatatcgggtgaggtctcaagcacttcaacgaagtgctcatgcttgagccccagtccggcccgaccgggaaggccgggcgcctgagcctgggagacggcttgcagggatgaaagagtcatcatcagtactcaggttttgcgagggatcaggatttagcggtgaaggccgcttcctggccgaaaccggtcggcgaggtggagcttggggttttgaggcaggtgccggcagggaccagtttccaggcgttggcctggtctttgactttcgaggtcccggcgcaggaagtgccggcgcccgcggcgcaatcgttcttgcccgcttcagcgacgccgaagcatttctgcatgtcgtcggcagcgtgggcggtggtggtcagagtggacaggctcagggcagaaccgagggccaggacgagggtagcggcagacagtttggtagtcattgtgtatctccagcagtgggttgagttggcgggcttgagtgcctgcttgtaccactagagacggcagggtggaatccgttacaagtcgatcaaaaataatttcaggcgacgcgaaacaaatatgggaggggcaagcccctcccacatttcagagccggttcgcctagccgccgaggtacgcctcacgcaccttcggatcggtcagcaactgctcgcccgtgccctgcatcaccacccggccgttttccagcacataggcgcggtcagcaatcttcaaggcctggttggcgttctgctccaccaggaacactgtcacaccgtccttgcgcagttgttcgatgatgtcgaagatctgctggatgatgatcggcgccaggcccagggaaggttcgtccagcagcaacagcttgggcttgctcatcagcgcccggccgatggcgagcatttgctgctcgccgccggacatagtgccgccgcgctggctgaagcgttccttgagccgagggaacaggtgcaacaccttgtccatctgctcctggtagtcgcccttgtcggtgaagaagccgcccatggcgaggttttcttcgaccgtcaggcgcgagaacacgcggcggccttccggcactaccgcaatgcttttacgcatgatgtgggacgactgctgccccaccagctcttcacccatgtagcggatgctgccgctatgggcctggggcgacccgcacaaggtcatcagcagggtcgatttgccggcaccgttggcaccgatcagcgtaacgatctcaccttggcgcacttccacgttgacgctgtgcagggcctggatcttgccgtagaaagtggaaacgttttcgaattgcagcattttacgcttcccccaaataggctttgatcacttcaggattgtcgcggatctgctccggtgtcccgtcggccagcggcgtgccctggttgatcactacgatgtggtcggaaatgctcatgaccagcttcatgtcgtgttcgatcaacagcaccgtggcgttgttttcttcacgcaacacgctgatcagcgccttgaggtcttcggtttccttggggttcaggccggcggccggttcgtcgagcatcaggatccgcgggcgggtcatcatgcagcgggcgatttccaggcgacgttgctgaccgtaggccagggtgccagcagggcggttggcaaactcggtgaggttgaccttgtccagccagtactcggcgtattccatggcctcgcgctcgctcttgcggaacgaaggggtcttgaacagtcccgcaaagaagttggtgttcaggtgacggtgctgggcgatcaacaggttctcgaccgccgtcatgtccttgaacaagcgcacgttctggaaggtccgtaccacgcccttgcgggcgatctcgtgaccggccaggccctggatcggctggccgtccagcaggatgctgccaccgctcggcttgtagaagccggtgaggcagttgaacaccgtagtcttgccggccccgttggggccgatcagcgcgactacttgtttctctttcacggtcagggccacgccgttgaccgccagcaacccgccgaagcgcatgctcaagttttcgactttcaggatctcgcggctcatttgcgcagctccatgtgtgggcgttgcatcgggagcaaaccttgaggacgccagatcatcatcagcaccatcatggcgccgaacatcaacatgcggtattcgctgaactcacgcatcatttccggcagcaggatcatcacgatcgccgccaggatcacgcccagttgcgagcccatgccccccagtaccacgatggcgaggatgatcgccgactcgataaaggtgaacgactccggggtcaccaggccttggcgcgcggcgaagaagctgccggcgaaaccggcgaacgcagcgcccagggtaaaggcggagagcttgatgatggtcgggttcaggcccagtgcgcggcaggcgatctcatcttcgcgcagcgcttcccacgcacggccgatgggcatgcgcagcaggcggttgatcacgaacagcgcggctaatgccagcagcagcgccaccaggtacaggaacaccactttgctcaccgggttgtagtcgatcccgaagtactcgtggaacgtctgcatgccttcagcggcggaacggtcgaacgacagcccgaagaacgtcggcttggggatgctgctgatgccgttggggccaccggtgatatcggtgaggttacgcaggaacaggcggatgatttcaccgaagcccagggtcacgatcgccaggtagtcgccgcgcaggcgcagcaccggaaagcccagcaggaagccgaacgtcgccgccgccatgccagccagtggcaggcagacccagaagctccagcccaggtaatgcgagagcagcgcataggtgtaggcacccacggcatagaagcccacgtaacccaggtcgagcaggccggccaggcccaccacgatgttcaggcccagacccagcaacacgtagatcaggatcagggtggcgatgtcgaccgcaccgcgcgagccgaagaacggccagatcaacgcggcgatgatcagggcaatgatgatgtagcgctgggtgcgcggcagggtcaggaattggctgaccttgggcgataccaacggaccacggttgctcttgagcaaggcattgaactgatcgctgaacaacacgcgcaggaacatcagcaccgaacacagggcgatgacggtcagggtcacgggacctgtgccatgcacttcaaggttgatgccgacaatgctcagcttgaggccgagtaccgggaaggccacggcccataccagcaaggcgctgaaaaacgccgatttaagatatctgctcatactttctcaacctccggacggcccaggatgccggtcggacggaacaacagcaccagaaccaacaggccgaacgccacgacgtccttgtattggtcaccgaagatatcggcgccaaaggcttcagccacccccagcaccaggccaccgagcatcgcgcccgggatactgccgatgccgcccaataccgccgcggtgaaagccttgaggcctaccaggaaaccggcgttggggttgatcacgccgtactgcatgctcagcagcaccgccgcgacggcggccagcgcagcaccgatcacgaaggtcagggcgatgatgttgttggtgttgatgcccaacaggttggccatcttgatgtcttcggcgcaggcccggcaggcacgccccagacgggagcgggagatgaacagggtcaggcccagcatcgccaccagggtgacgacgaagaccaggacctgcatgtacgaaatcagcacttcttgtgcgccgcctgggccgaaggagaagctccccggaatcaggttgggaatggacttgtccttggagtcctgggacagcagtacagtgttctgcaggaaaatcgacatgccgatggcggaaatcagcgggatcaaacggttgctgccacgcaagggacggtaggcaacgcgctcgatactgtagccataggcactggtcacgacgatcgacgcaaggaacgcagcggtcatcaacagcggcagggagtggatacccagcatggccagcccggcaagggcgatgaaggccacgtaggagccaatcatgtacacctcgccatgggcgaagttaatcattccaatgatgccgtaaaccattgtgtagccaatggctatcaaggcataggtgctgccaacggtcatgccgttaaccagcgtttggaaaaaatgatagatctcaggcattacagcgctcctaaaaacccgatacgcatttcactggtggagtcatgttccggccctgcactgtgttctgtgagcacatttgcacaaagcgtttgccagcgaaccgctggtgacggttttaagattttcaggtgagccagcgcccggatcgcgggtgtcaggcccataaacctcgtaaaacaaagcccactgctttcacagtgggcttgctggaccagtaatgcctggcttactgaggggaaacttcggtttttggtttaccgaagtgccattcgtagaccacgaacttgaagtccttcaggtcgcccttggcgtcgaagctcaggtcgccggttggggtcttgaaggtgcctgcgtggatggcagcagccactttggcggtgtcttcggacttcgcggcagcgataccgccggcgatgacttcaacagccgagtaggccgggaacacgaacggaccggttgggtcctgcttgttcttggtgaactcttcaacgatcgccttgttggctggatcggtgtcgaacgacttcggcagggtaaccagcaggccttcggaagcgccctgggcgatttgcgagatggagtcgttgccgacaccctctgggcccatgaacttggcgttcacgcctttttccttggcctggcgcaggatcaggcccagctcagggtggtagccgccgtagtagacgaagtcgacattggcttgcttgagcttctgaatgagcgagccgaagtctttgtcgccagcgttgatgccttcgaagagggcaactttcacgcctttcttctctagggtctgtttaacggcggtggcgatgccttcaccgtactgctgtttgtcgtgaatgacagcaacgacttttggcttcacgtggtcggcaatgtagttaccggccgcagggccttgggcgctgtccaggccgatggtgcggaagaccagtttgtaaccacgggaagtgatttccgggctggtggcagccggggtgatcatgatcacgccttcgtcttcatagatgtcggaggctggctgagtggagctggagcagaggtggccgaccacgaacttgacgccgtcgttgaccactttgttggccacggcaacggcttgtttaggatcgcaagcgtcgtcgtactccttggcttcaagcattttgccgtcgacgccgcccttggcgttgatgtcggcgatggcttgcttggcacccatgaattgcatgtcgccgtattgcgtcacaggaccggttttaggacctgcgataccgatcttgatggtgtcggctgcgaacgaatggccggcaaccccagccaggaccatagcggcaaacagtttggaaatctgcttagtagccttattcatagtgctccactcttactgttgtattttttatagttctagcggccttgtgagctgcagaaccggatcagatatctcggatatccccccggcagtgccctggcaactgtaccggtacagtgtagagcgccggttgatcgcttgaaaagctggctgctgggggcaaaacccgggtatgtcgcttaaatgaaagaaaaagacagaattgcggcggggtgatgccagagtttcgggcaatccttggctttcctgacactttcaatcgatgacgcatttgcaactgggtttttctgcctgacgctcgacgttatgattgcgccgattttttattcaggtgaactcccatgacgcaagaacctagcaccctctatgccaagctgctcggtgaaactgccgaaatttcctggaaggagcttgagccgttctttgccaagggtgccctattgtgggtcgatgcgggtctggatttgatcgaagcagccgaaggcatggccgaggataaccgcgacaaagtcgccgcttggctggctgcggggagccttggcgaagtgtctgcgacgcgggcattggacctggttgagcgtgatccaagtttgtgggcggtggtggtttcgccttggatactgatccaggaaagggcggcgtaaagaatgagcgcactaaaaaggtgcgcaattcaggctatcagaagtgtgtagcggagtaaccgccggcaccgtgatggcaccttgccgtagagaaaggtcacaggtgagggtgacgtaaacgtcacgggaacagttatacccgtggcacaagcgctgcaaaattgtttcccgatatgttcgcatccccctgcaggagccggtgatccggctcctgcaggcaggtcaggcggtcttgccagtgtggttgttcagcgagatcaccttggtcttgccaatccggtggcggtagatctcacgcaagtacttgatcgccttcttcacgcaatcccgtgacaggcgaatgtcattgatcgacacgaacttctccttgtcgttgatcaactcgcggtacttcttctcatacatcggcttgatcgcgtaccagttggtgtcgaggatcttcgccgggttctcgaactcgttgagcaactcgtcgatacggtcttcgtcgaagtcctcgtggatgatgaagtccaggatcgagttgtccagcgtgtcatcgaagcgatacgggttgcgcgcaaagcagcgtttgatgaaggctacgatcaacgtgaggaagtcatccgacaggcacgggctcttggcgatcagggtggtcagcgacaggttggccgaggcgccgatcaccagggcgtagcgcttgagcgtggtgttggggaacaggctgttgaggtgggtcttgagccggttcaagtccatgtaggacagcttgtagtccttgggcagtgacacaatcgagaccaccgacgagcagttcttgaagaagtgcaggtcatgcagcgcggcggcgtcgtagccagagttcttgtactgttccagggacgccttgtagcgcttggattcgatcggcaacaggctgatgccttcgatggcctgggtgaccttgttgaagtgcggcaggtcgatggaacggaagaacaggtcgtcgatgttcaggcgctgcggctctttctcgaacaccttgaatttgtcatttgacggcgccggggtttccgggaccacggactctgcgtaggcaatcgccactgggccggccaggctcatgaacaggtcgttggcatccaggcgaatggtttcgccgatgtcgatgccggcgcgccggaaatagttctggtcgtagtcggtggtcacggcctgggcggtgaggatgttgaagatctgctgggaaatgtactggttggcgtgtttttccatggcattgacgtcaatgttctggatattgccgtcatcgctttcttcggcataacgcatgatgtcgttggagatcagcatcatcgcgttccacggccggattcgccccttcacgctggcttcgctgctgtcttcattggcgaagttgtacgaaaaatcccattcttccgacaggtatttgcacagcagtcgcccggcgttgatgtgcagcgcctcggacatttcgctgcggtggtcggaaatgttcggcagcacgcagatgccgctggtgaagatcggctcgaacacaaaggcgtggccgctcttgctgtcgtgctcatcggcgggcttggtgtcgaaggtcttgttcatgtacgagtgttgctgggccaggccgaattccgaagccatgcctgaacctgtgccgccgccggcgctgaagatcgagaagtacaggcgcgactggttggccttgatgccgcaggagtcgatcaggtacgagtggatcatcttccagtcggggctggaaaaacgctgggtgtctttgttcaggatgatcttggccaggtactggccgaggatcggcgcattgccggcgccgccggcatggacctccgacaggtccatgattttcatcttgctgtagtcgcgcaggaagccgcttttctcgcctttgcgcgagaagcggatacgcccggcgatgtccttgtccaagtcgcccagcatcaccagcggctccaccaggaacaccggtttgctggccttgccgctgcccaggcgcaggttgttgcgcagccactgggccgggctgtagcccttgtcttgtgacttgtcttcgttgctgaattcgttcaggtagaacttgcgcgcgttgtacaccagttccgccacgtccagcgcgatgttcgaaccgcagcggcccaggccgatcaggcacaccgaggggaattcctgttcgttgcgcggatcgctgtcgccttccaggtggggcggtcgcgggaacaccatgtcgcgcaggccgtcgagattgtcgaggatgcggtcggtattggtctcggtgaagtacaggtattgctgggtggccagcgggcgggcggtgctcaatgactttgaacctgagggtgtgtccgcaggagctgggagcaacacgtcggataccacggtggcagagttatttttagaagtcattgtgcgccatgtgcctgggcggatggctgaagagaatcaaggggccatcacggaatgggtgttcgcgactttacagtgcgtccttgtcctggacgattgggttttaccccgatgatttcagggaaaacacggccggactctgatgaatcggccgttcgtcggggttctttaggcaaatgatggcgaaatgccaaagattgggcgtcagcgaattggcctgacgatggatgtggagccgccgcggcctggggaatgctctttgggtgcgctgctgtccttggcgccctgcgtgctgtgcgggtacagcgggttacgcaggctgatgccctgcatcacgcccataatgtcactggccggcacggccgggctcagcaggtagccctggacgaagtcgcagccatgcttgagcagcagctcgaactgggcctgggtttccacgccttcggtcacgacttccaagtgcagggtatgggccatgccgataatcgcctggacgatctcgatatcggcggtggacttgggaatatcctggataaacgagcgatcaatcttcaacgtgttgagtggcagccgcttgaggtaggcgagggaggagtagccggtgccaaagtcatcgatggccagcgacacgcccagcgcgcggatttgccgcagcaacgccagggtgctgctgatgttgcccatcagcgcattttcggtgacttccagttccaggcggttcgcgccgatcccgctgaagcgcaaggcgtcttcgatttcgtccgccagctcgtcacgggccaggttcagcgccgagcagttcaccgccatggtcaggtcggtgtagccccggtcagacagcaggctcaggtcatgacacgcctggcgcagtacccagtggtccagttcggcaatcagcccgttgctttcggcgatgccgataaaccggtccggcgccagcaacccgtgctggggatgctgccagcgcaccaaggcttccaaccgtgtgaccttgcccaatttcatgtcaaagatcggttggtagaacaacaccagttggttgcgggtgcgcagtgcgctgcgcagttcttcctccaattgcagttcgaggaaggcacgggtcttcaggttggagctgaagaagttcaagttgttacgcccggcgtccttggactggtacagcgccaggtcggcagttttcagcagctcttcgcaggtcaggccgtcatcggggaacaggctgatgccaatactggtggtcatcaccatgcgccggccggccagctcgatgggttctttcatctgctgcatgatgcgctgggccaggtgccgcgcctcgtcgcggtggtggatgctgatcaggatgcagaactcatcgccgccaaagcgcgccaccacatccgcatggctgcgcactgagcccttgatatgcccggccagcacggtgagcagctggtcgccggcgtcatgcccgaggctgtcattgatgcgtttgaagtggtcgatatcgaggaagatcaccgccatcatgccgtttgacgcggttttttcggcgagcttctcggcaaagatctgattgaaaccgcgacgattgagcaggctggtgagggcgtcgtaatgggccacctgttgcagcgacgcgcgggcctggtcgagttcgctgagcagggcgttgacccgccgcaggtcgcgttccttgtgctgcagttttttgtcggccagggcggcgctgatgctgctgccgatcaccagcagggtgatgacggccaccgacaagcccagttgaatggggttgttatccagtggcaacgaaaggtcggccccgttgggaacgatgagttgcatggccgccatgccggtaaagtgcatgctcaggatcccggcgccgagtaccaggctggcggcatacttgagcagttgatggaacacaccggcgccggtacgcaggtagctcgacagcaacagcgcagccaggctggcgccgatagcgatacccaccgaggccatgaacagtccagactcgaaatagactttggcctgcgagcgcatggctgacataccgacgtagtgcatcagggcgatgccaatgcccatccacaccgacgccagcaggtactggtggaaacgcaggttggaatgactgagggtctgcatggcgaacaacgaggcgaccaacgcaatcaacagcgaagcaaacgtcatcaacaattcgtagtggattgcgatgggtgcctggaaggccagcatgctgatgaaatgggtggaccagatcccgcctgccaggcaaccggcgccgagccagcgccagtggcgtctggcggtagggtcctcgacatggccgacacgttcggccatatccagcgtgccgaagcccgccgcgcaagcgaccagataggcgagcagcaccagaaaggggttatgactgcaattgagtaataagtgcccgctctctggaagctcggtaaaaaaatgcagacctagccattccatagcatgtcccgtcatagagtcacgtcactgcctgaggcgatgacctatgaggtcgagtatagaagcgtaggaaaattcgcaaggaataatggcactttgcttcgctacgattttggcatgccgtccatagcgtttgatgctaagcgctgatgggcaggtccaattcgataggtgcttccaatggcgccaggccaaaggcggcgcgtgctgcatcgcaatcggcgttgtgcacgccgtcgtaccacgaggactcgaactcacggcacacgcttgagcgttgttcgtagatcgtgcagcgggtgccttggcccacttcgccctcaaggctgcagcagcgcgcgggtttctggtcggtgccgatcatggccacgcgggtcgggttgatctgcaccaccaggtcatcgggcaccgtgccccccgacgaggcgcactcaccccagaagaaagacacacgaaagtgtgaacagcaggcaccgcaattcagacacggactggcttcggacatgggcgtcatcgataagaaaagtaggttggggatgctacggaaggctcgccattctatccgtgccatggccattgggaaggggggcgcgcacttatatttttgtggggaaagtcccgtgttgccgggcgaaatcatgccctatcagctttacgaatcattacagacaaccgggccctgcctgactatgttgcaggtaccgggcaggatgcatcgggcatcgcagctctcataacaataaaagagacggacccatgcagaactcgacccaagcggcgaatgcctggcgcattctgttcctgctgttcctagccaacctgttcaacttcttcgaccgcaccatcccggcgatcatcatcgagccaatccgcatggaatggcacctgagcgactttcagctcggcatcatcggcaccgccttcaccatcgtctacgccattgccgggctgccgctcgggcgcctggccgacaccggctcgcgcagcaaactgatgggttggggcctgttcgcctggagcgggctgacggcggtgaatggtctggtcggcagcttctggacgtttctactggtgcgcatgggcatcggcattggcgaagccagctatgcgccggccgccaactcgctgattggcgacctgttcccggcacaccgccgtgcgcgggccatggggatcttcatgctgggcctgccgttgggcctgttgctggcgttcttcaccattggctggatggtcaaggcgttcgacagttggcgtgcgccgttctttatcgctgcggtgccggggctgatcctggcggtgttcatgttctatatcaaggaacccaagcgcggcgcggcagagaccgtacaagtatcccaggaacgcgtcgaccgcccgatccgccgtgtgctggcggtgccgaccttcctgtggctggtgctggcggggttgtgcttcaatttcgccacctatgcctgcaactcattcctggtgccgatgttgcagcgttacttcctgatgccattgcaggatgctgcggttgctacgggtgtgattgtcggcctgaccggcctggtgggcctgaccctgggcggctggattgctgacaaaatccatcagcgggtcgccaatggccgcctattgtttgcggcgttcagcctgatcatctctaccgtgaccaccgcgtgggcgttacacgccgggcgcatcgagattggtgtgtttgtggcgttgttcagtgtgggctggttgttcgcttataacttctacacctgcgtgtatacagcgatccaggacgtggtcgagccgcgcctgcgggccacggcgatggcgctgttcttcgccggcctgtacttgctgggcggtggcatggggccgatcgtggtgggtggcttgtccgaccactttgcccattcggcgatgtacgcggcgggggcagagcagatgaccgaggcttacaaggccgtgggattgcacgacgccatgtacctgattccggtggcgttgtttttgaccatgctgttcctgttccaggcatcgcgcagttttgtgcgcgatgccaagcggatgaaggatgggctgggggcggttgaggtgccggcttcggcggtgaccgcttgatattgaggtgacgccatcgggggcaagccccctcccacatttgactgggttgtcatatcgatcaccgatcaattgtgggagggggcttgcccccgatggggcctcgaaggccaataaaaaaggcccgcattgcgcgggccttttcatttaacagggcagggcagtgatcaacccgccaccaacacccggatcgcttccaagcgcagcgccgccttgtccagcatggccagaccttgctcgcgctgattgcgcagggccaccaactcactgtcacgcacggttgggttgaccgcttgcaacgcagtcaggcgcgccagttcttcgtcggtgtccgccgccaggcgacgcttggcctcggccacgcgttcggcatgttgcggagtgatcttctcttcgccggcgttgatccgtggcgttagctggtcgcgctgggcctgcacgaacttgttggcgctggcgcgtggcacgctttccagctggtcgttgagggtcacgaatgacacacggctcgacagatcgttgccattggcatccagcaggcagcgcagggcggccggcggcaagtagcgccccaattgcagtgaacgcggtgcaactacttcgctgacgtagagcagttccagcaacaccgtgcccggcttgagtgccttgttcttgatcagcgccacggccgtgttgcccatggaaccggacagcaccaggtccatgccgccctgcaccatcgggtgttcccaggtgatgaactgcatgtcttcacgggacagcgcctggttacggtcgtaggtgatggtcacgccttcgtcgtcgcccagggggaagctggcgtcgagcattttttcgctgggcttgaggatcagcgcgttttccgaatggtcttcgctgtcgatgccgaacgcgtcgaacagggtttccatgtagatcggcagggcgaactggtcgtcttgctcgaggatgtcttcgaccagggcatcgccttcaccggcgccgccggagttgagttccagcaggcggtcgcgaccggtgtgcagctcttcttccaggcgctcgcgctcggcacgggcctcgtcgatcagggcttgccactcgccatcgtcggcgttttccagcagcggcagcaggcgcgggccgaactgatgctgcaaggcgttgccggtcgggcaggtgttgaggaacgcgttcagcgcctcgtggtaccactggaacaggcgctcttgcgggctggtttccagatacggcacgtgcagttcgatcacgtgtttctggccgatccggtccagacggccgatgcgctgttccagcaggtcggggtgggacggcaggtcgaacagtaccaggtggtgggagaactggaagttgcggccttcactgccgatttccgagcagatcaacacctgggcgccgaactcttcatcggcgaagtaggcggcggcgcggtcgcgttcgaggatgttcatgccttcgtggaacaccgtggccggaatgccggagcgtacgcgcagggcgtcttccaggtccatggcggtttcggcgtgggcgcagatcaccaggaccttggtgcgcttgagcattttcagttggtcgatcagccattcgacccgtgggtcgaagcgccaccagcggttttcttcttcgacgtccggctgcgactggaagctgacttccgggtacagctcggcgtgttcgcccagcggcagttccaggtactcgtccgggttcggcagcgggtaggcgtgcagcttgcgctcggggaagccttgcaccgcagcgcgggtgttgcggaacagcacgcggccggtgccgtggcggtcaagcagctcacgcaccaggcgcgcgctggcttcggtgtcgccatcgttgacggcggtgagcagggcttcaccttcgtcgccgaggaaaccctggatggtcttgtgtgcggcaggggacaggcggcccttgtccagcagctcctgcacggcttcggctaccgggcgatagttctcgctctcggcgcggaaggcggcgaggtcatggaaacggttcgggtccagcaggcgcaggcgcgcgaagtggctgtcctggcccagttgttcgggggtggcggtgagcagcagcacgccgggaatcacttcggccagttgctcgaccagcgcgtattccgggctggccttgtcttcatgccacaccaggtggtgggcttcgtcgaccaccagcaggtcccaaccggcggcaaacagcgcgtcctgggccttctcgtcgtccaccagccactctagggccaccagggccaactgggtgtcttcgaacgggttggtggcatcgctttcgataaaacgttcttcgtcgaacagcgccacctgcaggttgaagcggcggcgcatttccaccagccattggtgctgcaggttttccggaaccaggatcaacacgcggttggcgcggcccgacaacagttggcgatggatcaccaggccggcttcgatggttttacccaggcccacttcgtcggccagcaagacccgtggcgcgatacggtcggcgacttctcgggcgatgtgcagttggtgtgcaataggttgcgcacgcacgccacccaggccccacaacgaggactgcaattggcggctggtgtgttccagggtgtgatagcgcagcgagaaccaggccagcgggtcgatctgcccggcgaacagacggtcgctggccaagcggaactggatgaagttggagagttgggtttctggcagggtgacctgctcgttttgcccattgaggccgtggtacaccagcaggccatcgacgtcgtcgacttcctgcacggtcattttccaaccttcgaaatgggtgatgctgtcacccggcgagaacctcacgcgggtgaggggcgcattccgtagcgcatactgacgagtgtcgccagtggccggatagagcacggtcaacaagcgcccgtcctgtgccagaacggtgcctaaccccagctctgcttcgctgtcactaatccagcgttgccccggttgatactgctgcgccatgctgcctgactcccgccgtgaaaaagccgactatcttaacggaacaagcccccacgcccaaggactctgacaaaaactactccgtttgcatggggggccggaagccgaatcgacgggtggcgggcacttgggagtgtcgactgggtcacaggttggcgagcctgtgctcaagtcaccctgcaacccgccgacagcctgttgatcaggagaataatcactatgctgccacccatgctgcccgtcagcgttgtgccggtcacgtcgcaactcgatccggtgcgccagaagccggacatcccgcccgtggtgccggtccagccgggctccaacgagagcaccatcgacctgaaaaagggcgatgccgagacgtcgacctttttgctgcgcgaagaacagcgccgccagcaggaacaacagagacgccggcgtgaagccgatgaagacccggagcagcacctggccattccgggcgatgtgttgaatgccgacaacaccgtgccagtggcgccgctgatcgaagatgcaccgcgccagggcctttgggtggacgtcgaggtttagtcgcgcaactcgcgcagggctgctatcagcaactcgatatcatgctcgttgttgagcgggctcaccgagatccgcgccacgctctccaggccgcgcgcctgcatatccagcggagtgtaggccgcgccgttggcgccgatattgatgcgcttcaaacccaggcgccgcttgagttcaaaggcatcccagccggccaggttgaaggcgataaggccggattggcgagtacccaggtcatgcagggtaatgcccgcaatcccacgcaacgcttcgcggattcgcgcgctggtctgcgaaaccctctcccacgcgcgctcgatgcccagccgattcatctcctgcagcgcattgcccagcccggccagcaaggcgaaggatgcttcgctggtttcaaagcgccgtgcgtcattgcgcaggtcgaaaccctggcccgtccagggcgccgaaaacacgtcgcgctgggccgggttcaggcgcccgaggaaatccggccgcacatacaacagcgccgtcccgcgtggaccgcgcagatgctttcttccggcggacttgagcacatcgcactgcaatgcttgtacgtctaccggcacctggccgacggcctggccggcgtcgataaagtaggggatggcgtgacgcctggccaattcaccgatggcctgggcggggttgatcaggccgccgttggccgggagccaggtgaggtcgatcagctttaccttggcatcgagcattgactccaacgccaccgggcagactgcgccgcttgcatcgcaggggatgacctccacgcgtgcacccgcttgcaccgcccgttccatgctggccaggttgccgccccattcgtgacggcctaccagaatgcggtcgccgggttgccaggggcccagggcctggaacgccaggctccaggcggtcgagccactgctggcaaatgcgatggacgaggtgggggcgttgagcagttgcgcggcggcgcggcgggctctttccaccagcacggcgccatgttcgccggcttccatcgggccgtcgcgagcttcccgttgcagttgctcgatgattgcatcaagggttgcctggctgggcagggaagcaccggcgtggttgaaatgcacgatgccggactggcagccaggcgtgtcatcccgcaggtgctggacttcaagcgggctcatgggtgcagctcgaaaatcgcatcaacctccacggccacaccggccggcagactggacacgccgacggcggtgcgcacatgccggcctttttcgccaagggcgttgaccagcaggttggaggcaccgttggccaccacgctctgttgcgtgaagtcgccgctgctggcgatgaatacacccaggcgcacggtacgcaccaggcgcgacaggtcatcgccgagggcattgctcaactgccccagcaggcccagcgcagcgagttccgccgcttgtgcaccttctgcatcgctgagggactcgcccaaccggcccacataggcgggtttaccctccaccagcgggatttgcccggagacgaacaggtgattctggctgaccacgtggttgatgtaattggcaatcggctggctgggggtgggcagcgtgaggcccagggcttgcacgcgttggcggagggagtcgctcatgatgaatcctcttgggtcgggaggcttcagcatgttggctgtattgaagggcgacaaacggatagatctcacacgacgtatcgaaaaaactcacgcgtcagtgcaggtttccttcagccactggctgaaacatgcggcggcttcgctaggggtgccttgaggtgcgatcagccagtagccgatgtcgctgtgatagggcggccaatcgaaggcctccaccaggctgccgtcctgcagcctgcgctcgatcaggcgatgacggcccatggcgatgccctggccggccacggcggcttcgaccacaatgttgtagtcgtgcagcatcacgcgggggtgctggccgaggtcgacctgatagtgctcggaccagtcggtccattcaaaggggcggtgcgaagtggccatcagcaacgggctgtcttgcgctgccttgaacgtcgggctgcacaccggcgagaggacttccggcatcagtcgcgtggcctgcacatcgggccaatcgcccttgccataacggatggccaggtcgacctcggcgcctgccacgtccgccagttgaatggccggcaacagctccacctgaatatgtgggtagcgattgaggaagccggccaggcggggcgccagccacaaggtcgcaaaggaggccagcaagccgatgcgcagcacggtggcactgggcgtgacgcgttgggcacgggtggcggcggcgatggcgtcgagggctgggcggatttcgtcgtagtactgttggccgtcggtggtcagatcgatcgctcgggtgcgtcggataaacaagggtttgcccaggtgctgctcaagcttttgcacctgatggctcagcgcgctctgggtcactgacaactcgctggcggccttgataaaactcaagtgccgcgccacggcttcgaaggcgcgcagcgccagcagcggcggaaggtccttgtgcagtgccacctgggtgcctctcctggttcggaaaaatagcgattttgtgcgatgacctgccttttgtcgcccgctgatttgccgttgagcgggggaggccgcattattggaccattccctccacgacgtaagccaagccatgagtgaagacgacaagctgatcgacctgaatgccgagcgcgccaagcgcgtgcatgacctcaatgacaaacgcctgaatgaagtccgccaggcatttgaacaggcaatgccactcggcaaagtgaagaaaaaaccgaagaacaaacccaaaaagcgttgaaacagcctgcatccattgatgcaggtcagttattgcccttctttacgccccgtcgcgggcgacattgatccccgtcaattttccaatccgccttctccattaacttagccctatcgcaacagggcaagtgcaggaggccggtcatgtttatcgataatgtggtgttcgccggagtgctgaccgtaagcctcatggtgatgttttttgtagggtttggaatttttatctggaaagacgcgaacaagcggaaaaaaccatagtttttccaggttacatgagcacgcaaggcattttgggcgacttcggtcgcccttttttttgcgcctgaattaacgcaatagtgatcggcataaaaaaaggtgcgaccctcgcggatcgcaccttttttatcgccggcggcttatcagctgcctagcgccttggaagccaaccagaacaacccggccgacagcgccacggttgctggcagggtcagtacccaggccatcaggatggtcttcacggtgccgccctgcaggccgcttttgttggcgaccatggtgccggccacgcccgacgacagcacgtgagtagtcgacaccggcagcgcgaagatgttggcaaagccaatcatggtcgcggtggtgatctgtgccgacatgccctgggcataggtcatgccctgcttgccgatcttctcgccgatggtcagtactacacgcttccagcccaccatggtgcccaggcccaaggccagtgcgacagcgaggatgacccagaatggggcgtattcggtggtggcggtcaggtctttgcgcagtttgtcgaggtcggatttctcacgggcatccaggcctggcagcttgccgacctttttcgcggtgtcgtccaggcagagcagatagcggcgcacttcaatacgctggtcagccgtcaacgcgtgatagtcggacacgcctttgagcgtgtcgaccagcgcgttgatggtcggctcggtctgctgcgggttgcactggaacttgccaggcaggtcgttctgcacgcttttgcccagggccaggaactcgccgagcgtggcgttgttacgctggtagaactggctcaaatgcacggtggcgtcgcgggtccgttcgatctggtaggtggtgctgcccaggtcgagcacgaattgcgccggtacgataccgatcagcaccagcatgatcaggccgatacctttctggccatcgttggagccgtgcacgaaactcacggccatggcggaaatcaccagcaccaggcggttccagaacggcgggtgtttcttgtcgtcgagcttgcggcgctggtccggggtcttgtgcatcttggacagcggacgccaccacttcaggccgatcagcaccagggctgcgacgaggaaaccggccatcggcgagaacaccagggaagcgccgatatccaccgctttctgccagttcacaccgtcagccaggggaatgtcgttgatcagggcgttggccaggccgacaccgaggatcgaaccgatcagggtgtgggagctggaggccgggataccgaagtaccaggtgcccaggttccaggtgatcgccgctgccaataaggaaaagaccatcgccaggccatggccggtgttcacattgatcagcaactccaccggcagcaagtgcacgatggcgtaggcgacacccacaccgccgagcaacacgccgaggaagttgaacaccccggagaagaacacggccaggtgtggcggcatggctttggtatagatgactgtggccaccgcgttagcggtgtcatgaaagccattgatgaactcgaaggcgaggacaaaggccagggcgagcaacaggctcacgagaacccaagcatccagtccgctgaataaatcgatcatgaaggttttctgacccggtcgtaagggggcgcgattatgccagaaaacctcagtaatcgatgcactagctgctcatcggtaacaatcttccgtgaaaaaaatcccggaaaaggcgtgcatcccagggttttcggggcttgggcaagtctttgatttatataggagagggcgctggaagcgggggattgtcacaaaaacgtcacggctgaaacatttgtatgaaattttaccgttcttggtagggtgcaagatttctggctgctagctaagtgccagcaacctgggccaaaaccttgatgctcaaaccgaatcgcttagggctcttcggtttttagttcctgttcaatcttttggatttcctgtgcaaatgcctggtcgagcaggctggcgcgcttgcgccatggtttgcgttcaggttcaggctgggcggcgtaggtggtgacttccccgccgtaaacgtccttgtaacgttgctcctggcgctcaagttccgcgcgcagttcatctttcgtcacatcgttacctaattgagttgagtgtaaatacgttgcagcgttatgccggaatgcgccctcggggtgtttcaagtcgaaccgccatagcgttcaagtttgaaacagacatgggtgaacacttgttagtgccgtcattcaaggcaggtagttgctatcgacgatgcacggcgtgtgcatcacgtggccagctccgttgccgataatgaaaccgggcggaccagtacacagggtgcattatagcggcgcatttgaataacactatcggtataaagttaaaaaccgtcaactttgtatgagtgttctgttacacgtgcctgttggtaattgcacacattcgggtgtcatgaatccatccgaacttcaggcgttaataagacgcctctggtttttttcaatccgccatgggtgaagggggaggttgcgagcaaattgcgataatcgaatgatcgtccgataatcgcacaaagttggcggccttgccttgtgcatctcggctgacgcggcttgtaatagtggccaaacctcccccgcggttgacaataagacaaaggatcccgacatgaacgatcaattgcgcaactctttcgcgtcagtggcgccgccgatcgttgcgtccccggccaagcgtatccaggcgtttaccggtgatccggacttcatgacctccctggcccgtggcctggccgtggtgcaggcgttccaggaacgcaagcgccacctcaccatcgcccagatcagccaccgcaccgaaatcccccgcgctgccgtgcgccgttgcctgcacaccttgatcaagctcggctacgccactaccgatgggcgtacctattcgctgttgcccaaggtcctgaccctgggccatgcatacctgtcctccacaccactggcggtgtcggcccagccttatctggaccgcatgagcgagcaactccacgaagcctgcaacatggcgaccctcgaaggcgacgacattctctacatcgcccgttcggccaccacccagcgtttgatttcggtggacctgtcggtaggcggccgattgccggcctattgcacctccatgggccgcatcctgctcgcggcgctggatgatgcctcgctgcaggattacctcgaccacgccgacctgcagaccaagaccagccgcaccctgaccacgcccgccgcgcttttcgactgcttgcaacaagtgcgtcagcaaggctggtgcatcgtcgaccaggaactggagcagggcctgcgctccatcgcggtgccggtgtatgacgcctcgggccaggtgctggctgcgctgaacgtcagcacccacgccggccgggtcagccgcagcgagttggagcagcgcttcctgccgagcatgctcagcgccagtcgcgagttgagtgcgcagctatttgcttaagctgttcggtgaccgcacagatcccggtttggtcaattgcgctgtttcccctggcttattactgtgcggcagcgctccagggagcgcgcaataataacgacggcccaaggtcgtcagcccgccatcggtgtggaaataaaaacaatgaatcagccctctgtcggtacccctttggacgtgcagtccttcatcaacacccagccactgtcacgctatcagtggcgcgtggtgattttgtgtttcctgattgttttcctcgatggcctcgacaccgccgccatgggttttattgcgccggcgctgtcccaggattggggcatcgaccgcgccagcctcggcccggtgatgagcgccgcgttgatcggcatggtcttcggcgcactcggctccggcccgctggcggatcgctttggtcgcaaagtggtgctggtgggcgcggtgctggtgtttggcgcgttcagcctggcgtcggcctacagcagcaacgtcgatcaactgctggtgctgcgcttcctgaccgggctcggcctgggcgccggcatgccgaatgccaccacgctgctgtccgaatacacccctgagcgccacaagtcgttgctggtgaccagcatgttctgcggcttcaacctgggcatggccggcggcgggtttatctcggccaagctgatccctgcatttggctggcacagcctgctgctgatcggcggcatcctgccgttgatcctggcgctggtgttgctggtgtggctaccggaatcggcacgctacctggtggtgcgcaatcggggcaccgacaaggtgcgcaaaaccctgtcgcccattgagccgaacatcgtcgcccaggccagcagcttcagcgtgcccgagcaaaaaaccgtgaaggcgcgcaacgtgtttgcggtgatcttctccggcacctatagcgctggcacgttgttgctgtggctgacctacttcatgggcctagtgatcgtgtacctgctcaccagttggctgccgaccctgatgcgcgacagcggcgcgagcatggagcaggccgcgtttatcggcgcgttgttccagttcggtggcgtattgagcgcggtgggcgtgggctgggcgatggaccggttcaatccgcacaaggtcatcggcacgttctacctgctggccggggtgtttgcctacgcggtagggcagagcctgggcaatatcaccttactggcgaccctggtgctgattgccgggatgtgtgtcaacggtgcgcaatcggcgatgccgtccctggccgcacgtttctaccccactcaaggccgtgccacgggcgtgtcgtggatgctcggcatcggccgtttcggcgcgatcctcggcgcgtggatgggcgcgaccttgctgggcctgggctggaacttcgagcaagtgctcaccgcgttggtgatcccggccgcattggccaccactgccgtggtgatcaagggcatggtcagccatgccgacgccacctgacgcctgtgggaggggggcttgcccccgatggcagtggttcagccaacacatctcgtggctgatacaccgctatcgggggcaagccccctcccacattgattgagcgttgtctgaatgattagtgaggtaacaatctgttcgataatcgaacgttgagtcgattatcggattgtttggcccatttccccggcttaatcttcaagcacttcggcgccacctcagcgcctttttcgatccacaccgggagcccgaaccccatggctgaaatcctcgcgctgcgtgacgcggtgaagcaatttgtgaacgacggcgacaccgtcgccctcgaaggcttcacccatctgatccctacggcagcgggtcatgaaatcattcgtcagggcaagaaagacctgacgctggtgcgtatgacgcctgacctgatctacgaccagttgatcggtgccggctgcgcccgcaagctgattttctcctggggcggcaaccccggcgtgggctccctgcatcgcctgcgtgacgcggtcgagaagcaatggccgcaaccgctggaaattgaagagcacagccacgccgacctggccaatgcctacgtcgccggcgcatcgggcctgccgttcgcggtgctgcgtgcctacgccggttccgacctgcccaaggtcaacccgctgatcaagaccgtgacctgcccattcaccggcgaagtgctggcggcggtgccgtcggtgcgtccggacgtcaccgtgatccacgcgcaaaaagccgaccgcaagggcaacgtgttgctgtggggcatcctcggtgtgcagaaggaggcggcactggcggccaagcgctgcatcgtcaccgtcgaagaaatcgtcgatgacctgaatgcgccgatgaacagctgcgtcttgccgacctgggccctgacggcggtgtgccatgtgcccggtggtgcgcacccgtcctacgctcatggttacaacgagcgcgataaccgcttctaccaggcgtgggacccgattgcccgcgaccgtgggacctttaccgcctggatcaacgaatacatccacggcaccgccgacttcaccgaattccaggccaagctggccaccgcgcaggaggccaagtaatggcttactcgaccaatgaaatgatgaccgtcgccgccgcgcgccgcctcaagaacggctccgtgtgctttgttggtatcggcttgccgtccaaggcggccaacctggcacgcctgacgtcgtcgccggatgtggtgctgatctacgagtccggcccgattggcgccaagccatcggtactgccactgtccatcggtgacggcgaactggcggaaaccgctgataccgtggtgccgaccggcgagatcttccgctactggctgcagggcgggcgcatcgacgtgggcttcctcggcgcggcccaggtcgaccgcttcggcaacatcaacaccaccgtggtgggtgactaccaccagcccaaagtgcgcctgccgggcgcaggtggcgcgccggagatcgccggttccgccaagagcgtgctgatcatcctcaagcagtcggcgcgttcgtttgtcgacaagctggacttcatcacctcggtcggccacggcgaaggcggcgactcgcgtaagcgcctgggcctgccgggcgcggggccggtagggattattaccgacctgtgcatcatggaaccggaagcggatacgaacgaattcgtggtcaccgcgctgcacccgggcgtgacccgtgagcaagtggtggccgccaccggttgggcgattcggtttgccgagcaggtcgacaccaccgccgaacccactgaagttgagctgaccgccctgcgtgaccttgaagcacgcaccgcagccgcccatggccaagcaccgggagaagcctgatgcgcgatgtatatatctgtgacgccattcgtacccccatcggccgttttggcggtggcctgtccaccgtgcgggcggatgatctggcggcgctgccgatcaaggcattgatcgaacgcaacccgtcggtggattggacggcagtcgacgaggtgttcctcggctgcgccaaccaggccggtgaagacaaccgcaatgtggcgcgcatggcgctgttgctggcgggcttgccggaaagcattccgggggtgaccctcaaccgcttgtgcgcctcgggcatggacgcgattggcaccgctttccgtgcgattgccagcggcgaaatggagctggcgattgccggcggcgtcgagtcgatgtcccgcgcgccgttcgtaatgggcaaggccgacgcggcgttttcgcgcaacatgaagctggaagacaccaccatcggctggcgttttatcaacccgttgatgaaagagcagtacggcgtggacgcgatgccacagaccgccgataacgtcgccgacgattatcacgtgtcccgtgccgaccaggatgcctttgccctgcgcagccagcaacgcactgccgccgcgcaagccgccggtttcttcgctgaagaaatcgtgccggtgcgggtcgcccataaaaaaggcgaaaccgtggtagagcaggacgagcatccccgcgacaccaccctggaagccctggccaaactcaagccagtcaatggccccgacaagaccgtcaccgccggcaatgcgtcgggtgtgaacgacggtgcggcggcgctgatcctggcctccgccgaagccgtcaagaaacatggcctgaccgcccgcgctcgcgtattgggcatggccagtgccggtgttgcgccacgcgtcatgggcatcggcccggtgccggccgtgcgcaaactggtcgagcgtcttggcttggcggtcactgactttgacgtcatcgaactcaatgaagccttcgccagccaaggcctggcggtgttgcgcgagctgggcatttccgacgacgcacctcaggtcaacccgaacggtggcgccatcgccctcggccatccgctgggcatgagcggcgcacggctggtgctgactgcgctgcatcagctggaaaaaaccggcggccgcaaaggcctggcgaccatgtgtgtcggtgttggccaaggcttggccctggcgattgaacgcatctaacaagagaggattgctccatgagtgacaagcccggataccggcgcccgcaagcgggcactcaaccggattacctgcacccggcctaccagtcgacgaacctgcgttcgccgtcgcagcctttggtgttcttgccccattccttgtcggaaatcaccggcccgactatcggtgccgagcgggtcaacgagaaggacaacgacctcaccgcccagcatgaaggcgagccccagggcgaacgcatcatcattcacggccgtgtgctggatgaaaacggtctaccggtgccgggcatcctcgtggaaatctggcaggccaacgccgccgggcgctacaaccacaagcgcgacctgcacgacgcaccgctggacccgaacttcaccggcaccggccgcaccgtcaccgacgccgacggctggtaccagttccagaccatcaagcccggcgcgtacccgtggggcaaccaccacaacgcgtggcgcccggcgcatatccacttttcgctgttcggcccgagcgtgctgacgcgcctggtcacgcagatgtacttccccggcgacccactgctggcgtacgacccgatctacaactgcgtaccggacacttcggccaaggaacgcttgatcgcccgtttcgacctggaaaagaccattccttcctatgccctcggctaccgctgggacatcgtcctgcgcggccgcgacgccacgccgatggagaaatgagatgacactcaacgcgaccacgtcccacaccgttgggccgtattaccacatcggcctaacctggctgaaccgcgaagacctcaccgtggccgccacccttggcgagcgcgtggcgatcagcgggcaggtggtggatggcaacggcgatgtcgtcaacgacgccatgctcgaagtctggcaggccaacgccgctggcaagtacgaccacccggaggatgagcaggacaaggccctggacccgaacttcgaagggttcggccgggtgccggtggatgccgaagggcggttccgctttaccaccatcaagccgggcgccgtgccgggcctgaagggcaccacccaggcgccgcacctggtggtactggtgtttgcccgtgggttggtgaagcacttgcttacgcggatttatttcgagggcgaggcgctgaatggggaggacccgttgctggcgtgtgtgccagcagagcgtcgcagtaccttgattgcgcaacaggatgcggcgggggtgtatcagtggaatgtgattctgcaggggaccgatagggaaacggtgttcttcgattattgagtggttttttagggccccatcgggggcaagccccctcccacatgttgaccgcaccgcctatcaaatgtgggagggggcttgcccccgatgaggtcggttcaggcaccacctacccaaaagtcttcttgcggaacatggttgttgcaaagtatgtctaggctataaccgttcccactgagtgaaaaaaacatgacaacaacaacgagtcactacaccggagaagaacgcagcaaacggatttttgcgattgtcggggcatcctccggcaacctcgtcgaatggttcgacttctacgtctatgccttctgcgccatttactttgccccggcgtttttcccgtcggacgaccccacggtgcaactgctcaacaccgctggcgtgttcgccgccggcttcctgatgcggcctatcggcggctggctgtttggccgggtggccgacaagcacgggcgcaagaactcgatgatgatctcggtgctgatgatgtgcgccggttccctggtcatcgctttcctgcccacctacaaggacatcggcgcctgggccccggcattgctgttggtggcgcgcctgttccagggcttgtcggtgggtggtgaatacggcaccaccgcgacctacatgagtgaagtcgcgctcaagggccagcgcggtttcttcgcctcgttccagtacgtgaccctgatcggtgggcaactgctggcggtgctggtggtggtgatcctgcaacagatccttaccgaagaagaactgcgcgcctggggctggcggatccccttcgtgatcggcgcgatcgcggcggtgatctccctgctgctgcggcgcaccctcaaggaaaccaccagcaaggaaatgcgccaggacaaggacgccggcagcgtggccgcattgttccgcaaccacaaggcggcgtttatcaccgtgctcggctacaccgctggcggctcgctgattttctacacctttaccacctacatgcagaagtacctggtgaacaccgccgggatgcacgccaagaccgccagttacatcatgactggcgcactgttcgtgtacatgtgcatgcagccgctgttcggcatgctctcggacaagatcggccgtcgtaactcgatgctctggttcggcgccctcggcaccctgtgcaccgtaccgatcctgctgaccctgaaaaccgtgaccagcccgttcctggcgttcgtgctgatctccctggccctggccatcgtcagcttctacacctccatcagcggcctggtgaaagcggaaatgttcccgcctcacgtccgcgccctgggtgtgggcctggcctatgcagtggccaatgcgatcttcggtggctcggcggaatacgtggccctgggcctcaagtccatgggcatggaaaacaccttctactggtacgtcaccggcatgatggcggtggccttcctgttcagcttgcgcctgccgaaacaggcggagtacttgcaccacgatctgtaagggatgagctatgacactgcgcacgagcaatcaattgttcgacgcttacttcacggcggacagcatggccgaggtgttctgcgataggggacgcttgcagggcatgctggatttcgaagcgggattggccagggcgcaggcccgggtcgggctgatccctgaggccgcggtcgcaccgattgcccaggcgtgcctggcctcgctgtacgacgtggatgccctcggcgtggcgattgccacggcggggaattcggcgattccgttggtgaaggcgctgggcaagttgattgccagtgaagatgtcggggctgagcgctatgtgcatttgggcgcgaccagccaggatgtgatggacaccggcctggtgttgcaactgcgccgggcgctggcgctgatcgaaaccgacctggcgcgcctgggggatattctggccgcccaggcccagcgttacgccgccgtgccgttggctggacgcacttggttgcaacacgcgacgccggtcaccctggggatgaaaatcgccggttggctgggggcggtgacgcgcagccggcaacggctggtggagctgaagccgcgcttgctggtgctgcaatttggcggtgcttccggaacgttggccgcgctcggcgagcaggccatgccggtggccgaagccttggcaaacgagttgcaactgaccctgcccgaacaaccctggcacacccagcgtgatcgtttggtggagtttgccagcgccctcggtttgatcgccggtagtctcggcaaactgggtcgcgacatcagcctgctgatgcagaccgaagcggcggaggtgttcgagccgtccgcaccgggcaagggtggttcgtccaccatgccgcacaagcgcaacccggtgggcgcggccgtgctgatcagcgcggcgacccgcgtgccgggcctggtatcgacgatgttcagcgccatgccccaggagcacgaacgcagcctgggcctgtggcatgcggaatgggaaaccctgccgcagatttgctgcttggtctccggcgcattgcaacaggcgctgctggtgagcgaagggttggaagtcgaccccgagcgcatgggcaaaaacctcgacctgacccagggtctggtgctggctgaagccgtcagcagcgtgctcgcccaacgcctgggccgggagactgcgcatcacctgctggaacactgctgcaaacgtgccgtcgcagaagggcgtcaactgcgtgcggtactggccgatgagccgcaagtcaccgccgagctgtcggcggccgaactggaccgcctgctcgacccggcccactacctgggccaggcccgcacctgggtcacccgcgccgtagccgaacactttgcttgaggagaccaccatggcatttgtacacctcgccgaaggcgacctgcattaccaactggacgggcctgtggatgcgcctgtgctggtgctgtccaactcactgggcaccgacctgcatatgtgggacatccagatcccggcgttcacccagcactttcgcgtgctgcgtttcgatacccgtggccatggcaaatccctggtcactcctgggccgtacagtatcgagcagctcggccgcgacgtgatcgcgctgctggatgcgctggatatccaacgcgcgcatttctgcggtttgtccatgggcggcctgatcggccaatggctggggatcaacgcgggcgagcgcctgaaccgcctggtggtatgcaacaccgctgccaagatcggcacgcccgaggtgtggaacccacgcatcgagatggtgttgcgagacggcgcagcggcgatggtggcgctgcgcgatgcgtcgatcgcacgctggttcacggcggacttcgcggccgctaacccgcatcaggccaagcagattaccgacatgcttgcggcgacctcgcctgaaggttacgccgccaattgcgcagcggtgcgcgatgcggattttcgtgagcaactggccctgatcaaggtgccgacgttagtgattgccggcaccgacgatgcggtcaccccaccggccggcagccactttatccagaaccatgtgcagggcgccgagtacgccgagttctatgcggcgcacctgtccaatgtgcaggcgggcgctgcgttcagcgactgtgtcattgaattcctgctggcccactgaggagctgtttgtgaacgagaaacaacgttacgccgaaggcctgcaagtgcgccgcgaagtgctgggcgatgcccatgtcgaccgaagcctcaatgccctgaccgagttcaacagcgaattccaggagatgatcacccgccatgcctggggtgacatctggactcgtccgggactgccgcggcacacccgcagcctgatcaccatcgccatgctgatcggcatgaaccgcagcgaagaactcaagctgcacctgcgtgccgccgccagcaacggcgtgacccgtgccgagatcaaggaagtgctgatgcagagcgcgatctactgcgggattccggcggcgaatgcgacgtttcacctggctgaatcggtgtgggatgagctgggggttgagtcccaagcgtaagcttgggacctgagacaaacgtgatatccggttggatttattcatcgctaatgtaatcgctagtgtatacgtaactttcccgctttggctcccccatctctttacgaaaagcattttcattgaaggggtccgggttggtattagtgagcggtgtttttggatcgttatcgtgatcaaagtcgggtttgttggtgggtaggccgacggcttgaagttcgacgttctgttcgccgaagttgtagccgggttgccttgtaccattcataccggtccaggcatgcgacagttcatgatataggaagttgtgaggtccaatgacacggttgggcttgaattcgatataggagcgattgtagcctacttcgcctcccctgtcgggtgtgccactttttccattttgaataaaaccaaaatctgatgtttctgcgtattcggattctctgccttcttctgtgagttttatctcgtttgggttgtgcccgtagtaatagctgttgtcccgggattcaacttcgaatatttttagtggcgcaccatttactgatgctttcgaatctagaaattgcagcattttttgacctgtacgcgaggatctcatcatttccaagtcatcttggacgcgctgcttaaattcaggcgagccttcaactttaattcctgtggctccgacgtgcaggtagttaatagggttgacaatattgtctgggtgtttttgtactgagtcgcttggcttcgcgtagatagaatcaaagcgattgtttgactctattttgtcattgcctgcacctgcatagaaggtagtcaaagatttaccttgtaataggtcgtcacctaagcctccgctcatcacggtgtgtccacgttcactaccataaagtttgtcatctccagggcctccatccatgtagaccatttgcgccttggctccgaatatacggtcgttacccttattgccgtatatataacttatgccccggcccgcacgtatggtatcgttgccgtcattgccttcaacataataagttccggaaccaagtcttattgtgtcattaccccctccgccaaagatgcgggagcgggccccgcgtgcagtgatgtcgtcatcaccgtctccgctttctataatgatttcatttgatacatctttgtcgactttgagggtgtcgtttcctccgtgagttcgaatagttattttttgattagcgtcacctatcgtgtaacggttaggctgtacagtgtagcgcttttcgttgactacgatgtcgagggtttcatctttgcctttgcgcacgcgaatagagtcggctttgttgccggtttctataataaggttgtcgaacgttagctggccgtgcttggagggggagttttttattgattttatggtttcttccctagtgacttttatattttcatcttgatacacaagggttggttgaatgatggttgtatataaaggttcttggtctgtggtgggacgaggtgttcctgctcgctcagtatgcgcacttgaactgttgcgttctccgctgataaatataggagtgtcagaatttttagtagactctgctaatttatatttttcagcgggtgagggcaggggtgggtaatttttaatcatcggttgaccattaaattaaaatgtgaggtacctcctgattggttttttttacgtaatagttccattttcagtttagcgagagtcagaatccccaatccaattgcaggcaggtcggttaggcacctccacttcggcgccagcaacggcgtgacccgcgccgagatcaaggaagtgctgatgcagcgcgcgatctactgcgggattccggcggcgaatgcgacgtttcacctggctgaatcggtgtgggatgagttgggggttgaattgcgcgaataggcgtcagtgggagtcggcatcccatacccaattccacacgcccggcagatgcaccggctcactcacgtccttcaccgtgcgcgccagtgccgcacgctgcagagctgccgtatcggtgtagaacggttcagcggcggtcttcatgccgttgatccgtgcactgtccagcaggatctgcaagtactcctgcatatgccgtgcggtgtagcgattgatgtcgtggaaggtcaccaccacagggatcaccccatccaccgtcggcaactcgcccaacgcaatgtgttcgcgcaccaccgacagttgccgatacaaattggcccggcgccgtgggctgccgttgaagccccagatcttgccgtcattggcactcaaatccgtgagcagcacctgcatgccgtgacgctggtaggcggcgaaggtgcggcggtcgtaattccagaacggcgggcggaccagtaccggcgggttgccggtgatcgccgcaatgtcagcggcaccctgggtgagggtgcgttccagttcggcgtcattcagccagcgatggttggtgtgaaacgccgtggcggtgtggaaggccaggatgtggcccgccgcatactcgcgctgcatggtcttgcggccccgtgaactgccaccggagcgcgaggcttcggtttgcaggaagaacaccgccttgatccccgacagcaccgggttttgcgccaggtcagccaccactgagcggctcggattgttgtagcccgacgcgctgggaccgtcgtcgaaggtcagcagaaagcggatcggcgcccggccttgcaggcgctgctcggtctgcggtgtcagggcaatgggcgcgccaatacagccgctgaggctcagggccagggcaagcacggcggaggcgatggcgaagggtttcatggtgggcgcgggctcgaataggaggccgctgttgggtggatcagcagcggcaggcgcgcacgatacagcaagatggttggtatgaggttaccgcctgaccaacgagcgcggttcaggctcaaccgacgtattaggtacgcagcagcttgcccatttcttcgttcaaggcattttcagtgaagggtttgggattggggggaaactcgggcgtggtcggcaaccctacggcttgacgttcgctgttggggacatcgaatgattcacccttgaacatctccacagtcgtgcctgccagcgcagtgccgttaccggcgtcataggcgtggaccatttcgtgatagagaacggtgataggtgagtatgtcacgccggccagtacttccaggactgagcagttataggagatttcagcccggtcagcccgcgaccccggcacgccgtcgaccatgaaaccccacttggggtcgccgccgaccaccggtgggcgttcgtattgcaacaaggctttgagttcctggctgccataggtgtagccgcttcctgtgtcgagcaggtcctccaccactgtcaccggtgcgccgggctatcgcgttcatttcggcaagtatctgtttgccctgaggggaactgcgcagcaaggccagatcgtcttcgacccgttggatgaagtcggccgaaccttttatgacaaacccttcaagcgacgcgtggtcaggcgtgacggtggttaatctcgagccgttgaggtgccggatcgtatcgccgggttgagcgtagatcaggtcgccggggcgattggcaaccactgcatcacgaccgctgccggtatagaacgtactgcggtcgttgccaatcaagcggtcattatcagcgccgccatgcagcacggtatggccattgaccttcacgtccaactggcctggcagggtctggctgatgtggacctggtccgctttgtcgccggtttcaaggatcaggctgttgctgaggctgttgtcaaagtcgtactcccagactgattgcccgccggccttcaaatttccatcatccagaaacggatgccgatgcgcttgaaccggattgtcgggcgtgaacgccagttgaggaggagtgtcgggtgtatagcggctgttgctgaagaccgtggcgcatgcaatacgatttgaagcgtccatgtgagatccctgtgggagagccaggcattggccctgtctcgtgaagtcgaccggacgcttcaaatcgttcccagggtaaatgttatgcggctttacagcaggctgatcgggtaactgacgatcaaccggttctcgtcgaactcgttgttgctgtagtcgcgacgcatgctggaattgcgccagcgcacggtcaggttcttcaggctgccgctctgcacggtgtagcccaattcgctttcgcggccccattccttgccgtcagtgatggtgccggtgtggacgttgctgccgctgatatagcggttcatcagggtcaggccgggcacgccgagggcggcgaagttgtagtcgtggcgcacttgccaggacttctcctgggcattgtcgtagctgctgttgtagctgtcgttggccagggtgccgccgctggtgccgttgacgcgcatccaggcgctgttgccggtgagtttttgcaggccgacgtagaaggtgttgccgccgtatttggcagagaacaggccagaccaggtcttgttatccagctcgccggcgcgggcgctgccatcgtccttgccatagaaaaagcccaggttggcgcccagggtccagtcgcccaacggctggctgtgggtcaggttgacgaactgctggctgtagatgtccttgagctgggcattccacaggccgatctgggtgtgtttgtcgttgaacaggtattcgccgccctggaagttgaagcggtccgaggtgaacgcggctttgccgaacatcgacatgtcgctcatgctgctgtcgtcacgcgggctgttggcgcggaactggccaccgtagagggtcaggccgtcgatctccttggaggtgatctgcccgccgcgcagggtttgcggcaaggagcggccatcgtccgaacgcaggatcggcagcaccggcatccattcgccaaccttcacttcggtcttggaaatacgcgccttgaacgccacgcccagacgcccgaactcatccgccgggcggccgtcgtggtccaacggcagtagttgggttcccccggtgccacgtccgccatcgagcttcaacgagtacagccccagcacatccacgccgaagcccaccgtgccctgggtaaagccggacttggcgtcgaggatgaaactctgcgtccactcctgcgcaccgccctgggtcttggtcgggttggtgaaattgcggttgaagaagaaattgcgcaggttgaggttggcgctggcgtcttccaggaagccgtgttcctcggcgagggcgggcagggcaagactggcgacagcggttgccagcaagagccggcgcgggtggaaagtgctcatggcgtaaggacctgttgttattgggtttatgcaggtggcggccatggtgcagggcggtgcgggggcgatgaaagtgggggagagccggttgtgggcgatgatcgaacgcaagttggccagtgaagaaaaacaaaaagcccaccaaaaggtgggcttcgttgacgcgggcgctatcagaacaacttcaacgccggtgcttcttctttcaacggctcattcttcgcggtctgctcgttccagccaccgccgagggccttgtacaggttgacctcgctggtgagctgcgccaggcggtcggtgatcagcgattgctgggcactgaacagttggcgctgggcatcgaggaacgtcaggttgctgtcgacaccgatgcggtagcgacgctcggccaggcggtagtaatcctggttggccgcgacgaagccacgctgggcgtccagttgctgcttgtaggtctcacgtgcggcaagaccgtcggagacttcctggaagccggtctggatcgccttctcgtagttggccacgttgatctctttctggatcttcgagtagtccaggctggcgcgcaggctaccggcgttgaagatcgggatgttgatctgcggggcgaacgaccaggtgcccgaaccgcctttgaacaggccgcccaggttagggctcgcggtaccggagctggcggtcaggctgatgctcgggaagaacgctgcgcgggccgcaccgatgttggcgttggcggccttgaggttgtactcggcttgcatgatgtcgggacgacgttgcagcaggtccgatggcaagccggccggcacttcgctgagcaggttatccgacagcggcttgctggcgatattcgccggcaggccggtgcccagcagcagggtcaggctgttttcgtcctgggccacctggcgggtgtaacgcgccagggcgacccgggcgttttccaccgaggtacgcgattggctcaggtcgagggccgaggccacaccgacttcgttgctgcgcgaggtgagcttgaagctttgctcgtacgcgtccagggtgtcctgggtcagcttgagcagttccttgtctgcctgccaggtcaggtaggcattggccacgctggccaccaggctgatctgggtactgcgccgcgcttcttcggtggcgaagtacttttgcagggcttcttcgctcaggctgcgtacgcgaccgaacaggtccagctcatacgagctgatcccgagaccggccgagtattggctgctgatggtcgattcgccggtctgcgacaagcgggccggggtacgcgaacggctgccgctgcccgtggccgacacggccgggaacagatcggcgcgctggatctggtactgcgcggcataggcgtcgatgttcagggccgctacacgcaggtcacggttgttcaccagcgcggtctggatcagctgttgcagggcagggtcatggaaaaactgcttccagccctgctcgacagcggcctggctcggcgcctgggccgacgaatacgccggcccctgcgggaactgtgcggccaccggcgcttcggggcgctgatagtcaggtatcagcgagcagccactaagcacgaatgcggtgacggctagggaaagtagcgacttgctcattggccagcctctttaggggtttcagttgtgtcagtctttttacgttcgccggcggcggatacggttgcgaagaacaggggcacccagaagatcgccagcacagtggccgtgatcataccgccgattacaccggtaccgattgcgtgctggctgcccgaacctgcacccgaggagatcgccagcggcagtacgccgaggatgaacgccatggaggtcatgatgatcgggcgcagacgcatccgcgaggcctcgatggccgactcgacaatgcccttgccttgttcgtgaagttctttggcgaactccacgatcaggatggcgtttttcgctgccaggcccaccgtcaccaacaggcccacctggaagaacacgtcgttggacaacccgcgcatgctggtggcgatcaacgcacccaccacacccagcggcactaccagcaccaccgcaatcgggatcgaccagctttcgtacagggccgcgaggcacaggaacaccaccagcagcgacagggcgtacagcgcaggcgcctgggagccggacaggcgttcttcgtacgacaggccggtccacgcgtagccgatacccgccggcagttgcttggcgatacgttcgacttcggccatggcgtcaccggtactgtagcccggagccggggtgccgaggatttccatcgccgctacaccgttgtaacgcgagagcttgggcgaaccgtagatccacttgcctgaggaaatggccgacattggcaccatcttcccggagtcgctgcgcacgtaccatttgtccaggtcttctggggacatccggccagcggcttcaccttgcacgtacaccttcttcacccgaccacggtcgatgaagtcgttgacgtagctgccacccagggcgatcgccagggtctggttgatgctcgacagcgaaataccctgggcactggccttctcgtcgtcgacggtgagctcgtactgcggctcatcgttcacgccgttggggcgcacacccgcgaggatcttgctttgcgcggcagccccgaggaactggttgcgtgcgtccatcagcttctggtggccaacgccgccctggtcttgcaggaacacgtcgaaaccggtggcgttacccagttccagtaccgaaggcggcacgatggcgaacaccatggcgtccttgaaggcaccgaagaagtaaccctgggcacgcttggccacttcgaataccgaggtggatgcatcacgttcatcccacggcttgagcatcacgaacgccaggcccgaactctggccacgaccggcgaagttgaagccgttaacggtaaataccgatttcaccgccttgccttcgcctggctcgccttccttgtcgttgagcaggaaggcacgcatgtcgtcgatgactttctgcgtacgttcggctgaagatccgaccggggtctgcacctgggcaaagattacgccctggtcttcttccggcaggaacgcgctcggaatgcgggtgaacagccagatcatgccggcgaagatgatcaggtacacgaagaatgcaggaaacttgtgcttgatcatattgcccacgccgcgctcgtagctcagtacgccacggtcgaaggtgcggttgaaccagccgaagaaaccacgcttgggttggccgtgtttctcagggtcgatcggcttgagcatggtggcgcacaaggccggggtgaagatcagggcaaccagtaccgacaacgccatggccgaaacgatggtaatggagaactgtttgtagatcacaccggtggagccgccgaagaatgccattggcaacagtaccgccgacagcaccagggcaataccgaccagtgcgccctggatctggcccatggacttgaccgtcgcctctttgggcgacaggtgttcctcggccattacccgctcgacgttttccaccaccacgatggcatcgtccaccagcaagccgatggccaggatcatgccgaacatggtcagggtgttgatggtgaagccgaacgcggccaggatcccgaaggtacccagcaataccaccggtacggtcatggtggtgatgatggtggcgcggaagttctgcaggaacaggaacatcaccaggaacaccagcacgatcgcttcgaccagggtgtggactacaccggagatcgattcggtcaccaccggcgtggtgtcatacggcaccacagccttcatgcctggcgggaagaacggttccagggacgccacggtggcacggatggccttggcggtgtccagggcgttggcgcccgacgcgagcttgatcgccatacccgacgccggcttgccgttgaactgtgcactgatgctgtagttctggccgcccagttcgatccgtgcgatgtcacgcaggcgaacctgcgagccgtcggtattgaccttcatcaggatcttgccgaactcttcggcggtctgcaggcgggtcttgccgatgatggttgcgttcagctgggtgccgggcagggcaggcaggccgcccaattggccggtggccacctggacgttctgtgccgcaatggcagtgctgacgtcgaccggggtcaactggtagttgttcagcttggccgggtcgagccagatacgcatggcgtactgcgaaccgaacacctggaagtcacctacacctgacgtccgcgagatcgggtcctggatattggacacgatgtagttggacaggtcgtccttggtcatgctgccgtcttccgacaccagaccgatcaccatcaggaagttcttcaccgatttggtcacgcggataccctgctgctgcacttcttgcggcagcagtggggtcgccaggttcagcttgttctgcacctgaacctgggcgatgtccgggttggtaccctggttgaacgtcgcggtgatggtcatgctgccgtcggagttactgtccgaggcgacataacgcaggttgtcgataccgttgagctgctgctcgatgacctgcaccacggtgtcctgcacggtttgtgcggacgcgcctgggtaggtcacctggatgtcgatggcggttggcgcgatggccgggtattggttgatgggcaacttcaggatcgacaatgccccgaccagcatgatcaccagggcaattacccaggcgaaaatgggacggtcgataaaaaatttcgacatgggttactccccctggccagcagcggcggcaggagcgggagcagaaccggcaggcttggcgttgtcggcgtccttgaccttgacttcgatgcccggcttgatgaattgcaggccttcggtgatcacgcggtcaccggcgtccaggcctttttccaccagccagtaggcgccggcagtgcggtttgccaccagttgacgctgctcgaccttgttgtccttgttcaccaccatggcggtcgggatacctttgatatcacgggtcacgccttgttgcggtgccaggatggccttgctgttcacgccggcttgcaactgggcgtgcacgaacatgcccggcagcaaggtgtggtcagggttggggaacacggcgcgcagggtcacggagccggtggtctggtcgaccgatacttcggagaactccagcttgccgtcctggccataggcagtgccgtcttccagggtcagcttgaccttggccgcgttggcgccggctttttccagctggccgctttccaggtcgcggcgcagtttcagcatttcggccgaagactgcgtgacgtcgacgtagatcgggtccagttgctggatgacggccatggcatcggcctggccgttgctgaccagtgcgccttcggtgaccgaagaacggccgatacgcccggagatcggcgcgaacactttggtgtagcgcacgttgatctgggcggtttgaacgtttgcttccgcggtcatgcggttggcgacggcggtgtcgtattcctgacggctgacggcctgctcatcgaccaactgcttgtagcggtcggagatggacttggtctgggtcaggctggcctgtgcgcttttcagggtggcgtcatacaccgacgggtcgatttggtagagctgttgcccttccttcacgtcgccaccttccttgaacaggcgcttgagaatgatgccgttgacctgtgggcgaacttccgcaatgcggtaggcggtggtgcggcctggcagctcggtcgtcagggtataggcttgcggttgaatggtgaccacgccgacctgaggggtttgggcgggcggagccgcttcttcctttttacatccgctgagcagcgatgccagggcgacggcagtgaccagagcggtaacagctggcttaagttgcatgaagatcctcgggtcaggcgcgcagggtgcgcacaagaagtgtggaagggtaaaaaacaagctgtgagtggataagtagcttgctacgcaatatacttacgttcatggttgtttgtaaactcttgacaggcttcgcggaatattgacaaagcaatgcccaaagtctcgattttagtacgttcggcgcccatgacggtgtcgtcccacaagtattcagacggtggtcaaccaccacccacagtgtcctgattgaggttttactgccatggttcgtcgcaccaaagaggaagctcaggaaacgcgcagccagattctccaagccgccgagcaagccttctatgagcgcggcgttgcgcggaccacgctggcggatatcgccgcgctggccggtgtgacgcggggtgctatctactggcatttcagcaataaatccgatttgctgcaggcgctgctcgacacgctgcatgagccactggacgagttggccagggccagtgaaagcgaggatgaactcgacccgctgggctgtatgcgcaagttgttgattcatttgttccatcaagtggccctggacccgaaaacccggcgcatcaacgagatcttgttccataagtgcgaattcaccgatgaaatgtgcgacatgcgccgccagcgccagacccacagcctggaatgcaacctgcgcatcggcctgacattgcgtaacgcggtccatcgcgggcaacttccggaaaacctcgacaccacccgtggcgcggtgtgcatccacgcctacatcaacgggctgatcggccagtggctactggtacccgacagcttccaactgcatcaggaagccgaacgttgggtggacgccgggctggacatgctgcgctggagcccaagcctgcgcaattaagacaaaatgcgtaattgcatcaggttgtgtcaacagtaaagcccaaggaccgtcaatcgtccttacgcctgattagtggggtgactttatatacgggctggcgggtggttgataggtagccgcctaagtattttgtagcgattttgttgcagggctgtgaaggaatgtttcctacaggacgctacaaatcaaaatgtgggagggggcttgcccccgatagcnnnnnnnnnnnnnnnnnnnnnnnnnnnnnnnnnnnngctatcgggggcaagccccctcccacattgggtagtcgtactacttcggaataacgattacagcgccagggtcgggtagtcgatatagccgaccgggcctttgccgtagaaggtttccggatgcgcttcgttcagcggcgcatcggctttcaaacgcgccggcaggtccgggttggcaatgaatggcacaccgaaggccaccgcatccgccttgcccgaggccagccatgcattggcgctgtccttggtgaagcgctcgttggcgatgtaggtgccgccgaaggctttcttcaattgtgggccaaggctgtccgcaccttctttctcacgggaacagatgaaggcgatgccacgcttgcccagttcactggcgacgtaggtaaaggtttccgccagattgtcatcgcccatgtcatgggagtcggcgcgcggtgccaggtgcacgcccacgcggccggcgccccagacttcgatggcggcgtcggtgacttccagcagcaggcgtgcacggttttccagcgagccgccgtactggtcggtgcgtttgttggtgctgctttgcaggaactggtcgagcaggtagccgttggcgccgtggatttccacgccgtcgaagccggcggccttggcgttctcggcaccggtgcggtaggcgtcgatgatatcggcgatctccgccgtttccagggcacgtggggtcgggtagtccgccagtggacgcaccaggctgacgtggcctttaggctggatcgcgctcggggccaccggggcttcgccgttcaggtacaactcatgggaaatacggcccacgtgccacagttgcaggaagatcttgccccccgcgccgtgcacggccttggtgacgttggcccagccgcgcacctggtcgttggaccagatgcccggggtgtccggatagcccacgcccatcggcgtcacggaagtggcttcgctgaggatgagcccggcggaagcgcgttgcacgtagtactcggccatcagcgcgttgggcacgcgaccttcatcggcacggcagcgggtcagcggcgccatgatgatgcggttcgacagttccaggtcgcccagtttgatcggatcgaaaatagtcgtcatgggataacacctttctctattaagtggttgatcagtgggtagcgagggccaggtcggcatcgccgccctgacggaaagtaatcagcgtcaccagcagcgcgagaatcgccagggccgctgcggccaagggcacgctggtcaggccgaaaccgtgggcgatcacactgccgccgacccaggcacccagggcgttgccgatgttgaaggcgccgatgttcagggtggacaccaggttcggtgcagccttgccgaaggtcaccacgttgatctgcaacgccggcacggcggcaaacgaggcggtggcccagaggaacagggtgatttccgtcgggatcaccgcgatgctggtccagctcagcgccgtggagaccaccgccatgctgatgaacacgccaaccagggtcgcggccaggcgcttgtccgccagcttgccgccgatgatgttgcccacggtgaggcccaggccgatcagcagcagggtccaggtcacgcccttgggcgacacgccggtgacatcgccgagcagcggcgcgacgtaggtaaagagggtgaacatggacgcggcgaacagcgcggtcatactcagcgacagccagatgccggcgcccttgagggcggccagttcggcgcgcatgtcgagtttttcttcatcacgcttggccggcagaaagcggatcaggccgatcagcgccactaccccaatcaccgtcaccgcccagaacgtcgagcgccagccagctgcctggcccagtgcggtgcccagcggtacgccgagcacgttggccagggtcaggccggtgaacatcagggccacggccgaagcacgcttgttggccggcaccaggttggccgccaccactgaaccgatcccaaagaacgcaccgtggcacagcgcggtgaccacacgggcaaacatcagcacgttgtagtcactggccagggcgcacaaaaggttgccgacaatgaagatccccatcaacgctaccagggccgccttgcgtggcagcctggcagtggccagtgccatgaacggcgcaccgatcgccacgcccagggcgtagccggtgaccagccagccggcgccgggaatcgacacccccaagtccgccgccacatcgggcagcaagcccatgatgacgaactcggtggtgccgatggcgaaggcgctgagggccagtatgagtagcgagaggggcattcgtggttccttgttacagcgctgcgctgtcgtgcgcgctgagttcggtggtgagcgccgcgaggaaggcttggatggtgtcctcgttgcgtttgaaaaagtgccactggccggccttctggctgctgatcaacccggcgcgttgcagggtggccaagtgggccgacacggtcgactgggacaagccgcagcgctggtcgatctgcccggcgcagatgccgtattcgtggttgtgcagttgctcggggaattgcacggtcggatctttcagccaggtgaggatgtctcgtcgtactgggtgtgccagggcttttattatttcgtcgaggtcgatggacatggcaggtgctcggtttcgtacagcgttatatcgcgatgaggcgaactttaaatcggtctatcccgatataccaatatgattttggtctgagcctaggctcattcggtatatcgggttataacgatacgttggcggcagtgatagactgcgcgccatgaattatctcgcacatctgcacctgggcggccaacttcctgagcaactgctgggcagcctgtatggcgacttcgtcaaaggccgcctgcagggccagttcagcccgcaaatcgaagcggcgatccagttgcatcgttcaatcgatcgcttcactgacagccatccgctggtaggtgaggcgttgtcgcgcttcagcctgacccgcaggcgctatgccgggatcgtcctcgatgtgtttttcgaccactgcctggcgcgggattgggcgctgtacgccgaccagccgctggagcgcttcacctcgcaggtgtaccgcgtcctggcggccgaaccgcaattgccggggcggctggcgcagattgcaccgtatatggcggcggatgattggctgggttcgtaccgtgaatttgcggtgatggagcaggtgttgcggggaatctcgcggcggctgacgcaacccgaggaactggggtatgccatgcacgagttgcgagagttgtacgagccgctgagtgaagatttccgacggttctaccccgatctgcaagcattcgcacagatccagctgacaaggtaaagctgaatgtgggagggggcttgcccccgatagcaatggttcagtcaaagcatgcagtgactgacacaccccaatcgggggcaagccccctcccacatttgaacggtgttcacttgagttcaggcagcgaatgctggtcgagcatccacttgctccgcttccggcaccgccccgaacaacgccttctgcaccgcctgctgcgcctgatacgccagcgccgcgcgttcctgtccggcacaggcaatcggcgtgagcacatggatttccacgtcaccctggtcattggcaaacaagcgcatcaggtgcgagagcaaatcatcatcgccaataaacggtgccagcgggtccacttgcccatcacgcagataacggatcgccaccggttgcagcgacacatccgcatcgatcgcactggccagcaagcgcccgtggaacgtacgcaggctgcgcccgtcggtggtggtgccttccgggaacatcagcagcgggtgctgttgctccagatgacgggtcatctgcttgcggatcaactggctgtcgcccgagccccggcggataaacaagctgccagccttggccgccaaccaacctgccaccggccaggtgcgcacttcggccttggacaggaatgacatcggcgccacggcgccgagcagcggtatatcggtccaggacacgtgattgctcacccacagcatcggctgcgtcggcaattcaccgtgcaccgtcacgcgaaagggcagggcgttggtcagccgcgccatgaaaaaccgcgaccaacgctggcgccgcaccatcgaattggcgatgcccaaacgctcgaacaccccaaacacactggccatgctcaagcccagcgccaccaccagcagcacccgggcaatgcgcccgtacacgcgcaggcggctcatcacattgcagccttgaagtggcgcgcgtaacgcgggcacagctcatcgcgcttgagcaggatgaacacgtcggccacctggaaatcttcatcccagcacggctcgccgcagatcttggcacccaggcgcatgtaggccttgagcaacggcggcatctcggcgatcacgttggacggcaagtccagcgccggcagcggttttttcggttcggcgcgcaggtgttcgttgcacaggtagcgctcgcgcaggcgctgcatgatcgcgtgggcctggatcccgccgtcgtgcatcgggatgctcgcgcagcccatcaggtagctgtagccaccctggttgagcacctcggccaactcgccccacaacaccgcgatagtgccgccgttgcggtaggccgggtcgacgcaggtgcggccgatctccaggatcgggccctgcaggtggagcaagccatgcaggctgaattcttcttcgctgtagaaccggcccagggtgctggcggcctggtggtccaacaaacgggtggtagctaccagtcgaccgctgttcaagtcccgcacaccgatgtggctgcagtgaacatcatagtcatccctgtccaggcccagttccgcgcctttcagcttggcgttgaactcgccgctgaacacgttgaaccgcagggcctgggcttcctgcaacgcctgcgcgccaaccaggcgttcggcttgcagacggcgttcattgccggtgtcgctgatgcgggcgatctgagtcatggcgaatctccgagtgccagccacctttcggccggtcgacttgtttgtccaaactcaggctatgtaggctcggtgtcatctccatgaagttatggtgacgcttggatgacaggccttgtgtagcaaatctgtcatcaccctcggctaggctcgcgggcacgaatgcccccttgagtctgcgtccatggtcagaggcttgttgtgtgttgccctgctgttcgtcaccgtcaccgcccatgccgacacctggcctgacaaggattgggccaagggcacaccgctcgaaggcccggctgtcgacgccctcaatgcctacgctttcccagcgcgtgacgacaccacccgcaaaggcatccgcaccgacgcgctgctggtgatccgcgatggcgtgatcatctatgaacgctacggcgctcccaccaccgccagcacgccgcacctcacctggtcggtcagcaaaagcctgatggccacggtgctcggcgtggcctatggcgaaaaccgcttcaaactcaccgaccccgtcgcgcgcttttacccgccgatgaaacagcaccccaaggtgaccatggctgacttgctgcactggtcctcgggcctggactggcaggaagactacgaatacgcgccgctgaaatcctcggtggtggcgatgctctacacccgaggccgtggcgatatggcggactttgccgctgacaccgacgcggcggctgagccgggccgggtgtttcggtactccagcggcgacaccaacatcctctctgccgccctcaaaggcatgctcggccacaaggcttatatgagttacccgtgggatgcgctgttcaagccgttgggtattcgcaacgccatctgggaaaccgacgccgacgaaaccttcgtcgcctcgtcctacgcctacctcaccgcccgcgacctggcgcgggtcggcctgctgatggcgcgtgacgggcgatggggcgatcagcagttgctgcctaaagactgggtcgccttcaaccgccagccgttcgacaaatacaaggtcggccaggacgaagcggcgccgggtggtcattggtggcttaacaaaggcgaaccgcgcccctggcccgacgcccccgccgacaccttcgccgccctcggccactggggccaggcgttgtacgtgatgcctgacgaacagttagtgatcgtgcgctacggcgatgatcgcgacggcagctatcgccataacgaactgctcaagcacgtgctggcggcggtgcaaccatgatccgccgtcggccgtttaccagcctgtttctgctgctgttgctcgccctgctggggtggatctggcacgagcgcgtcaacctgcaagccttccccgacatcatcgcggcgtacacggccaaggaatattgttcgtgccggtatgtggagaacaatccggcggcgtattgccgggggtatgtgaagcagtacgtgccgacgagtgcgttcagcgataacccggagcgcagtgaggtgacggcgagtgggctggggcgcacgcacacggcgcggtggctgggggatcggcaggggtgtcggttggtgccgtgaggcttgtattcaaacagatttcttgtgtcttaatcgcatgcgttgctcttccctaatctaatgggcagtagtttccgggagggaaggggggtgaagtactattgctttctgcctgatgagcctaactgttgaattaagttgcgttgttataggtgatattccaatgtcttctaaaagcctgttatttctgacagttgatggtgttgctcgctttgatgaagaataagcgcgttgttgtcatgatcggttaacttgagtaataggagggcgatgtcatgggtagtattgctattgttgtgactggaattagtagtgatgagagggctgccgcagttttgagacggcttaacaatttggctgttcgtggtcttgcttatgcaccctacgcggatttaatatggtgcgaaactgcaaagcctaacttggaggaagtgcgaggatttaagtttgttgataatcctgaatttgatagaggggttttggctaatatcactggctttttcatgtcggggaagcaatatactgcggattttatattgagtttgtaaagggtataaaaactcgtcggtgataaggtttgatgtcgaaaggtgggtgttaagtctttggtgtttactatgcgatccgcggggaagttgaatatttgtgaacgcaagtttgctcgtgagaaacgtataagcgacgcgtttaatcaggtgccgttgttgcttacgttcttcgcgaacaagcccatttccacattgggtttgcgccgttcgtgacatgcgcttaaggttcgttcaggtttttcgccccacgagtcttcaatgttcaacgcttccgtcatcaagcccgttgccttcgctctgttggccgccgccgctgtgcctgcccatgccgactggtacctggataacgagtcctcgcgcctctctttcgtcaccaccaagaacaccgagattgccgaggtgcagcgcttcctggtgctgcacggcaaagtcgacagcaaaggcgcggcgcaactggaagtggagctggagtcggtcaatagcggcatccctttgcgcgatgagcgcatgcgcaatcagctgttcgagatcaagacgttccccgacgcgctgatcaacgcgcagatcaacctgcagccgatcaatgatttggctcccggcgcacaattggagttgcgcctgccgttgtccgtgaccctgcacggcaaaacccaaacctacagcgccgagttgttggccacgcgattggacgaccgacgcttccaggtagtgaccctggaaccgctggtgatgcatgccgaggactttgacctggcgccgggtgtggcggcgttgcgcaaagcggcggggctcaagtcgatcagtctgtcggtgtcggtgggtgcggtgctgatctttacggcgcgctgacgtgagtggcgcggtgttcccgtggcgcagcgccaaccgtttcgagttgttgatcgacgggccgaattttttcccgcagatgctggtgggcattgcccgcgccgagcggcaagtcgagctggagttgtacctggtggaagccggcgcctgcgccgaagccatggtgcaggcgctggtgctggccgccgaacgcggtgtgcaggtgcgttgcctgttcgatgattacggcagcctggcgtttaccctcgggctgcgcaggcgcttgaccgatgccggtgtggaactgcgcttctacaatcgcctgcgctggcgccgctggatgcgcaacctgtaccgcgaccatcgcaaactgctgttgatcgaccaggacatcgcctttgtaggcggcaccggcgtgaccgatgaattctggacgccgggcaacgacagtgccgactggcacgaagtgatggtgcaaatcagcggccccctggtgctcgactggcaagccctgttcgaccgccaatggcacgccaacaacgcgcgccgcgcctggaaacccgccacccatttcggcttgccacgcttacccaggatgcccgccaccggaccgggcctgggtcgtgtggcctatgccgatgcccgccaacaccgggacattttgcaatcgttgatccgtgccttgaacagcagcaagacgcgtatctggttggcgactccgtacttcctgccgacctggggcgtgcgtcgtgctctgcgccgggcggcggggcggggtgtggaagtgcgtttgctgctcaccggcccgcgcaccgatcacccgtccgtgcgctatgccgggcatcgttattacccacgtttactgcgttcgggcgtgcagatttttgagtatcagccgtgtttcctgcacctgaagatggtgctggtggatgactgggtcagtgtgggctcgtgcaacttcgaccactggaacctgcgcttcaacctggatgccaacctggaggcgttggaccctgaattgacgcgggcggtggcgggcagtttcgagcgggattttgcccagagccaggcggtgagcctggaggcgtggaagtcgcggccgttgtggcggcgggtgaagcagcgggtgtgggggtggattgatcggttggtggtgaacctgctggatagacgcggctagccagttcactgggaggcaaatgtgggagggggctcgcccccgattgcagggtgtcagtcactgaaaatattgactgaaccaccgctatcgggggcaagccccctcccacatgtttacagcagttcgaaggtttgctgctgtacgtcctgggaatccaacccgatctgcacattgaactcgcctggctccgccgcgtacttgagctgggtgttgtagaacttcaagtcttcctcggtgatggtgaagtgcagggtgcgctcttcaccggccttgagcatgaccttctggaagttcttcagctccttgatcgggcggatcatcgaaccggccacgtcctggatgtacagctgcaccacggtttcgccatccaccttgccggtgtttttcagcgtcacgctggcgtccagcttgccggtcttgttcagggtggtggatgacagcgccatgtccgacaggccgaacgtggtgtagctcaagccatagccaaacgggaacagtgggccggtggtgtcatcgaaatactgcgaggtgtagttgcccggcttgcctggggtgaatggccggccaatggtcaggtggttgtagtaggtgggaatctgccccaccgaacgtgggaaggtgatcggcagcttgcccgacgggttgtagtcaccgaacagcacgtcggcgatggcgttgccaccttcggtgccggcgaaccaggtttccaggatggcgtcggcctgttggttctcttcaaggatcgacagcgggcgaccgttcatcagcaccaataccagcggcttgccggtggctttgagggccttgatcaggtcgcgctggctttgcgggatgttcaggtcggtgcggctggacgactcgtgggacatgccacgggattcgcccacggcggctaccaccacatcggcatccttggcagccttgacggcctcgtcgatcatcacctgggctgggcgggtgtcatccaccacttccggcgcatcgaagttgaggaagttcaggtagtcgaccaccgccttgtcgttggtgatgttggcgccacgggcatagatgatcttgcctttttcgccgatcaccgcgttcatgccgtcgagcagggtcaccgattgctcgggtttgccggcggcggcccagctacccatcatgtcgattggcgccttggccaacgggccgaccagggcgatggtcgcggattttttcagcggcagggtgttgtcctggtttttcagcaacaccaggctgcgacgtgcgatatcgcgcgcgtcgctgcgatgcaggcggctttcggcgtaggtgtcggccgggtcatcctcggccttgccgatgcgcaggtacgggtccttgaacaggcccatgtcgtacttggcgccgagcacttcgcgcacggcgttgtcgatgtcgctctgttcgatttcgccggacttgagcaggccgggcaattccttgccgtacagcgagtcgttcatgctcatgtcgatgccggccttgatcgccagcttggcggcttcacgcccgtccttggccacgccgtgcttgatcagctcgaagatcgcgccatggtcgctcacggccaggcccttgaagccccagtccttgcgcagcaggtcgttcatcagccaggtgttggcggtggcgggcacgccgttgatcgagttcagcgccaccatcacgccgccggaaccggccttgatcgccgcgtggtacggcggcaggtagtcctggtacatcttgaccgggctcatgtcgaccacgttgtagtcgcggccgccttccaccgcgccgtacagggcgaagtgcttgacgctggccatgatgctgtcggcattcgccgggctcacaccctggaaggccttgaccatcacttcggcaatgcgcgagaccaggtaggtgtcttcgccgaagccttcggaggtgcggccccagcgcgggtcgcgggagatgtcgaccatcggcgcgaaggtgatatcgaggctgtcggcagcggcttcctgagcggcgatgcgcccggagcggccgatggcctccatgtcccagctggaggccagggctaggctgatcgggaagatggtgcggtggccgtggattacgtcataggcgaagaacatcgggatcttcaagcggctgcgcatggccgcgtcctgcatcggacggttttccggacgggtgatggagttgaacgtgccaccgatgcggccggcggcgatttccttgcggatcagctcgcggggcatttcggggccgatgctgatcaggcgcaattggccgatcttctcatcgagggtcatctgcttgagcaggtcgctgacgaaggcgtccttgtccttgagcgcagcaggctttgtttctgcccagacggggtgggtggccagcgtggcaacaaggccgagcaaacacagcttcttcatgaatatcctttttcggctcactgcacagcgaaaatgcgctgttctgccaaaatgtggggaacgtatgttgttgttcgagtgttataccgacaaatgccgcacacttcggaactcttattagcggtgggcatctttttagctgattgattcgatgcaatccagtcgtggcaacggattatgccttaccggtgcccaattccatcaaggttcgccaggagaaacaccatgcaagcagcacaaggttatcgctggggcttgaaagccgcggttctgctattgatcggcacggtgctcagcggttgcggcatcaacaacatcccgaccctggacgaacaggccaaggctgcctggggccaggtgcagaaccagtaccagcgccgcgccgacctgatccccaacctggtggaagtggtcaagggctatgccgcccatgagcaggacaccctcaccgccgtgatcgaagcgcgggccaaggccacttcgatccaggtggacgccagcaccctcgacaacccggaaaaactcaagcagttccagcaagcccaggacggcttgagcggtgcactcagccgtttgatggtggtgtccgagcgttacccggacctgaaagccaaccagaacttcctggccctgcaatcccaacttgaaggcaccgaaaaccgtatcgccgtggcccgccgcgatttcatccaggcggtgcaggcctacaacaccgagatccgcaccttcccgggccgtctgtggcacagcgtgatgtacagcgacttgccggttcgcgccacgtttgaagccaccagtgccgatgccgataaagcgccgcaagtgaagttcaaataaggccgcgctgaggtgtcgatgcgtttattacggataggcctggcactgtggctgttggcctgcgtgggcgtggcccaggcggcgctgaccttcccggcgctgaccgggcgggtggtggacaacgcccagatgctcgacccggccacgcgccagcaactcactcagcagttgcaggtgctggaacagacctccggcgaccagatcgtggtggtcaccgtgcccgacctgcaaggcgtgccgattgaggacttcggttatcagttgggccgcgagtggggcatcggccagaagggcaaggacaacggcgcgctgttgatcgtcgcccgcgatgagcgcaaattgcgcatcgaagtcggctacggcctggaaggtgtgctcaccgatgcgcagtcgtgggtgatcatcaaccaggtgattgcacccaagttcaaggccggcaacttcagccagggcatcagcgacggcgtggcggcgatgattcaggtggtgggcggcgaaccgctggccgtgccggcccatgtggcggacgccaactttgccaaggataatcccgggttttccatcggtctgtttatcctgctgatcggcgtgttgtggctgtgcaatcgcttgggcctgccggtgggtgcgatcctgctggcgattctcagcagcagcggccgtggcggtggtggcgggggcggcggcggtggtttccgcggcggcgggggcggctttggcggtggcggggcttcaggcggctggtgatgataataatgagagagcaagcacaaccatggcattactgactgaacacgagcagcgccaggtcgcgcaagcgatcgcccgggtggaaaagaccaccgacgcggaactggtgaccgtgctggccgcccgcgccgatgactacgcctacatcccgctgttgtgggctagcctgatcgcgctggtagtgccgggtgtggtgcattacctgtcgggctacctgaccatgtacaccttgctgctggcgcaatgggcgaccttcattgtgctgtgcctggtgttccgcttgcccaaggtgacgacacggttgatcccgcgttcggtgcgccactggcgcgcgtccaacctggcgcgacgccagttcctggagcagaacctgcatcacaccctgggcagcaccggtgtgctgattttcgtcagcgaggccgagcggtatgtggagatcctggtggatgacggcatttccagtcgcctggatgacagcaactgggatgggatcgtcaaggcgtttacccagcaggtgaagcaggggcagacgttggcggggtttgtggcgtgtatcgaggcgtgcggtgagttgctcaaggtgcatgtgccggtcacccaaacccgtaacgaactgcccaatcgcctggtcgtactcgaataaaagactcaacactgggcaaaaaaatgtgggaggggcggtgttccatccaatgaccactgatcaaataaccccgtgctctgaatcactatcccccctaaaatgcccggcattccctgcccgaggcgtttttgttcatgtctgtcactgctcaaccggatcatcatgcccagttcatcgaactgctgagcgcaagcctcgcgcagagtgcctttatcaaactggtgctggccaaatacgtcggtaacgaggctgagttgcagcggctgatcatcaagccggtaacggtcaaggagcagccgtgcctgtccttcgtctatcgctacaagacccgcgatatcaccaagaacttcccggtggccgagggagtggcaacgattgccgagctactgccggcatcgttcaagaacgcccatctgctgtcgctgagcgacgaagcgcagctggaatacagcaagaagaacaaaagctcgttgttcaaaagcaagccgcagcaactgcgcgaggcgccatcggctgagcataaccgcgagaaaaaccgcttcctcgacctgagccggccgttcctcgctgacctgggcgtgaccgacgccaagcagacgctgatcccgtcgatgtcgcgcaagtggaaacagatcaacaagttcatcgaggtgttcagccatgcgctgacctcgtcaccgctgaagctggaccagccggtgcgcgtcgccgactttggctcgggcaagggctacctgacgttcgccatccacgactacctgcgtaacaccctcaaggccgagggcgaagtgaccggcgttgaattgcgcgaagacatggtgaccctgtgcaacgccgccgccgcccgcctggagcacccggggctggtgttcaaatgtggcgacgtgcgcagcgtggcgcccagcgaactggacgtgatgatcgccctgcatgcctgcgacgttgccacggactacgcgatccacaccggcatccgctccggcgcgtcgatcatcatgtgctcgccgtgctgccacaagcagatccgcctgcaaatccagagtccggtactgctcaagccgatgctgcaatacggcctgcacctgggccagcaggcggaaatggtcaccgacagtttgcgtgcgttgttcctcgaggcctgtggttatgagaccaaggtgttcgagttcatctcgttggagcacaccaacaagaacaagatgattctggccgtgaagcgcgcagagccgctggacaatgcgcagttgctggaaaaaatccaggagctgaaggcgttctaccacatcaccgaacactgcctggaaaccctgctgcgcgcggatggttacctggcctgatcggccaatgctacgggcgcaggctgcaccgccgtcttgcgccccagcatcaccgtcacgatcaccccgcacgcgaacacccaggtaatcggctcgatgtgttctccaaagaacaacgccgaaaacgcgatggtgaagaagatctgcaacagctggatctggctgacccgcgcaatcccgcccatggccaacccggcgtaccaggcaaagaaccccaggaactgcgagaacagcgacacatagccaaatgcccaccatgcgcgcatcgaaatcgcgccttgatgttgtgccgccaggtaccacaccgggccgatcagcaccggtgtcgacagcaccagcgcccagcagatcacctgccagccgcccatctccttggccaatcgtccgccttcggcataccccaggccgcccaccgcaattgcaccgagcatcagcaaatcaccggcctggatactgccggcgccggtgatcaaggcgtaactcaacaccaggccactgcccagtgccgcgcaggcccagaaggctttcgatggccgctcatgggacaaccacgccgcatacagcgccacgcacagcggttgcaggccgttgaccaatgcgccgtgggatgccggcaaggtctgcatggcccaggccgacagcaccgggaaaccgagaatcacccccgcgatcaccaggcacaacccacgcacctggcgccagttgggccagcgttcgcgacgccacagcaacagcgccgccgccgggatcgccgcaaacagtgcgcggcccaggccgttgagcaacgggtggatttcctgcaccacgatgcgggtgaagggcagggtcaggctgaagatgatgacgcccagcaggccgagggccatgccggtgttttcgcgcgagctcatggggcaaccaaaacgagagggcttcaagggaagcccatctagccacatcccccgtcggttgcgggcctacagctgggtgcggatttatccgtacagtttttcagaagaagcgcgtgatgctgatcttggcgttgcggccttggctgtagacaccttcaccgctgagtgccggttggtagaagcggttgaacaggttatcgacggtgaagttgatctcggtgcccttgagaccggcctgctgcggtttccaattggcgaacaggccttgtgtgtcgtagctggcgttctccgtctggtcgtagataaagtcgccgatgctggagttcaaaccgcccgcgtaaatatcggtgggcacgcgatcggtcttgcgtacgaactggccctgccagcccacctgcgcgtcccaactcgggatcttggtacccagcaccaccacccatttggccggtgggatgtcccgcgcccacacgtgcaggttggtcgcccaggggttggtgtaggggttgtcgcgcttgcctgtggcccaggagtaagtcagggagccgaacaggtaggtcgagtcgtagtagctttccagctcgacgcccttgatggtcatgccgcccacattgcgatagttggtcctggacgccgcgtcactgcataccgcatcgatactgccggatactgtcagttgccgttcgcagccgacgccggtggctttcatgatctcgtcttcaatacggttgtggaacagcgtggtgcgcagttgcaggttgtcctcgtgggtgaagagccccgagaagttagtgacgttgcctgcggtaatcgccgtaatgcgctccgggtcgaggttcaggctggtggcgctgcgggtgctgagggcgccttggacttcgtactgttcatcgatcactggcgcgcgccaggtgcggttccaactggcgaagaaggccacatccggggttacgttccagaacgcggcgaggcgtggcgaccagccggtgtaggtgcggtcgctgtagtcgtgacccactttcgggtccgggttgctgtagtacggcgcatcgttggcttcgccgcgattgcgcacatggtcgtagcgcagggacggcgtgagggtcacgtcgcccagggtaatcgcgtcctggatgtagaacgcgttgctatcgaccttgccgtggggcatgaaatacggctggaaatgcccatagttgtatctggcagtgttgtaggtcgcacctggcatccagctttcggtttcgcgcttgtgcttgcggatctgtacgcccgtggtcaccgcgtgttccaacgggccggtggtcagcaggctggtattgcgcagttcgaggatgcggtctttgtaggacgtatccatcttgcgtccaccggtcgccaggctaatgacggcattcgcggcgcgctcatcggtctggtcggtattggactccgagtagctcagcttcaggtcgatcagcgggttgttcaacgggtggtactcgtacttgctcgaccaggtggtgtccaccgtttcgcggtcggccagaaagcgtgatacggccgtggcgtagccgtagcggtcgatggccgattgtgtcggcggtgatgggtaggactttgccgagaacggcgtcatacgctggctttgggcgcgtgagtaagacaggcccatgctgtgttcgtcggtgaagtacgcgttgaacttgaacagttggccttcgacatcctgcgcgctgttgggcaagcgtttggggttgatcgggtattcattgcgcgggtcgggaggtgtgccggcgagcttgaggtcgccgccgtcgcgcttggtcaggtaggccaggccatccatgcggccgtcgtcggtgcggccatacaccgcgccggtgtagacctgctcgtggttgttgctggcgtagccgtatttgaccatcgccccggcattttgcccgtccttgagcaggtcgggtgcgtccttggtgaccatgttgaccgtgccgccaaaaccgccgttaccggtaaatggcgagtaagggcctttctccacctcaatgcttttgatcaactcgggctcaatgaagatagtgccttgttgataacgctcgaaaccgcttttggccgcgccatccacggtcatcggcacatcttcggcatcgcccatgccgcgaatgttcatggtctggccgcccggcttgggcgagccacccatggataccccgggcagggtctgcaacagcgaaggaatgttatcgggctggtaacggtcgatatccgcctggctcagggtagagcggcccacggtgctggagtcgacctggctaccggtgccgatcacgctcagtgcatccagttgaacaacgccgctattggtggtcttggcctcttcgggccttaccacataggtactgccgaccttgatcagggtgaactcgccgtttttcagcagggtacgaatcgccgcttccggcgtgaagtcgccgttgagcgcgggcgcctgcacgttcttgagcaactcttcatcgaacagcaactggatctgtgcctgctgcgccacctggctcagggacgtggccagcgactgggccggcagcgtgaagggctcggcctgggcgctgaggctgtacgccaggcaggtggcgatcagggtcggtcgaagaaacaggtgcgaagcgtggcaaggcgcgcgaaacatgaaatcccccggtgtggccaagtggccgaaaaggtgtgcgtatcgaactcagaccggaggaagacggggcagctgaaaaaatccacacctgcgaatgcaaaatattctcaaataagaatcttgtgagtttatttgctcggttcgatcctcacgatgccgtcggtcgacatcacggttttcaccggcagcaaggcgggcaaggcgttgagcagggcgtccggatcattcacatccagattgcccgagaccttcaggtgcgccacggcgctgctgacctgcagcggcgcctgggggcgatacaggctcaattcatcgatcaggctggccagctcgcggttgcgaaatgacaggtgaccgctgcgccagtcggcgacctcttcggcggtgagggtctgctgctgcaccgtgcccttggcgtagctgtagatcgcacgttgccgggcgcccagcagggtgatggggcttttcgcgtccggctcgaaggcgacttggccatgggcgacgctgaccaccagttgctgctggctgcggcgcacatcgaagccagtgccgaccacgcgcacattggcctcgccggcttgtacgaacagcggccgttccttgtcggcggccacttcaatgtacagctggcccttgtccaggtgcaggatgcgctggtgcgcggtgaaatccacgcgtacgcgggtgttggcattcacatacaaagtgctgccatcgggcaggttgagggtgcgcatgcctttggcatgggccgcgacctgggtgtgatacagctcgcggggcgcgccgatatgggtggccaagaccgcgcacagcagagcagcggccacggccagggcagggcgccataccgacggtttgcgctggggcagcgccacgggtttgttcagttgttgcaactgggccaggtctgcccacagctgttcgaattcggcgtaggcacgggcatgggcgggatcggcctgccaggcggcaaaggccttgcgctcggcacgcccggtttcgctgcggttgcgcgcaaaccagctggcggcttgggcatcgatggcgtcgctgtcttcgatgtccagcacgtcggtgtcgctcaggcggttcattctggctgctccgtgccgggttcgtgttgaaggcgtcgcttgcaatgcagcagggcaaacgcgatgtgcttttccaccatgctggtcgaaatgcccatgcgctcggcgatctgcgcctggctcaggccttcgaagcggtgcagcataagggcttctcgcctgcggggcgagagttcggcgaggacttctttcaactgttccaggcgttgcaagcgttgcgcggcggccatgggatcgttttgctcgtcggtgacaggctccgcgtccatttcggcctgatcagagtggactgtgtgccgtaccttctgtttgcgccagtgatcacgcagcaggttgcgcgccatctggaacagaaacgcccgtggctgctcgaccttggcccggtcgcggtagtccagccactgagtgaagacatcctgggtcatgtccgccgcgtcgctggcgttgtccgtgcgtttgcgcaggaaatacaggatatctgtataaaacccgcgaaaggcatcggccgacaacgggtcgggcttgggacgagacatggatatccttcttgacgaagcacgacgtggaaaagtcgtgaatgatatcgagaactattgtcatttgtcattcggttaaatgacagccactgagtccatggcttgtaatcagccgggtgtgacctttaatcctacaagcaagtgaacaaaatcccacttgataaggagagagtcatggctggatggtatgagttgagtaaaagcagcaacgggcaattccgttttgtgttgaaggcggcgaacgcagaaaccattttgaccagcgagctttacgtcacccgcagcgcagccgaaaacggtattgcttccgtgcagaccaacagcccgcatgacgagcgctatgagaaaaaagtggccagcaatggccagccgttttttaacctcaaggctgccaatcaccaggtgatcggcagcagcgagcagtattcctcgacagcggcacgggacaacggcattgcaagcgtaaaggccaatggcccgacgaccacgatcaaagacaagacttgaaggtgtcgcaaaaaaacaaacaccccggctcgcaagaaccggggcgttttttcaggcggcgtccagcagcgccttcaattgattgcgtgccgtttcactcaatgggaacaccggcaaccgtgggtcacccacttccaaaccggtcaaccgcaacccggccttgattgtcgccggcaacccgcccttgaggatgaactccagcaatggcagctggcggtaaaacagcgcctgggcctgggtcagatcgttgctcaataccgcgtcgtacaaatccaggttgagctgtgggatcaggttcggcgccgccgtgcaccaacctttggcacccgccacgaaagcttccagtgccagcgggttgcagccgttgtagaacggcacgtcgctgtgacgatgcaactggtgcatgcgctggatatccccggtgctctccttgaccatggtcacgttggccacctgcttgatgatgcgcaggatcagctccaccgacatgtccgtgccgctggtggccgggttgttgtagagcatgatcggcacgccgatgctgtcgccgattgcggcatagtgggcgaggatttccgcttcgctgagcttccagtaagacgtcggcagcaccatcaccgcatcggcgccattggcctcggcgtagcgcgcgcggcgcacggccttggcagtggtcaggtcggaaacgctgacgatggttggtacgcgccgggcaatcttggccaggctgaaggcgctgacttcatcccactcggcatcgctcaagtaggcgccttcgccggtgctgcctaacggcgcgatggcgtgtacgccgctggcgatcaggcggtcgatggagcggcccaaagcgtcgaggtcgatgcgttggccgtcggcgctgaacggggtgatggtgtagccgatgatgccgtggatggttgggctggacatggaaagtctccggtcgaaaaagggcaggtcagttcaggcaatcggcgtgttggcgcaggttctgccgggcgtagtagttgaacgcggcgccgtggcgcttgggccgggagatccagtcatgggcctcgcgacccagctctggcaggatcggcttgatggtgccggccgccatcgccagcaactgcaacttggccgcgcgttcgatcaattgcgcgatcacgcaggcttcctcgatgctcgccccggtggacaactggccgtggtgcgaaagcaggatcgcgcgtttgtcgcccaaagccgtggtgatgatttcgccttcttcgttgcccaccggcacacccggccaggcctccaggaacgcgcagtcttcgtacagcgggcagaggtccatatgggacacctgcagcggcacttccagcatcgacagcgcggcgatgtgcgtggggtgcgtgtggatgatgcaattcacatccggccgcccacggtacacccagctgtgaaaacggttggccgggttgggaatgccgtgaccttccagcacctcaagatcttcgttcaccagcaacaggttgctggcggtgatctcatcaaaccccaggcccagttgctgggtgtaataggtgccctgttccggcccgcgcgcggtgatctgcccggccaagccggagtcatggccgttctcgaacaggatgcgacacgtgagcgccagcttttgccggtcggtccacgtattatccgcgagggtgttttgcatctggatcagcgcttgcttgaccagttggtctttcgggagtgctaatgtcttggccatatcggtgtcctttgggtggttcaatggacgtcggatttgctgtctcccgctgctcgcaaggtcgttgggtgaaggcaaatgacactaaagatgctatatgacaccttgtgtcattggcaagcacagctcatcgcttactgcatggattaaccgcagcgcatgtctatccgtttgaaattattgagaaaaaaacttggcgtcaccctggaggccctggccgaaaagtccgggatgaccaagagttatctgtccaaggtcgagcgcgggctcaacacgccatcgattgccgccgcgctgaaactggccaaggcattgaacgtcaaggtcgaggaactgttcagcgaagacagcgtcagcctggacagctacagcctggtgcgcagccatgagcggcccgacacctcgcccggttatgcggtgctggcccatcaggtcagtgaacgcagcctgctgccgttcatcatctacccgccggcggagttcaccgacaagaccttcaaggagcatctgggcgaagagtttctgttcgtgcatgaaggccaggtggaggtggacttcatgagtgaacgggtgatcctggagcggggcgatgcattgcacttcaatgcgcagaagccccatcggttgcgttcggtggggccggtgcaggcgcagctattggtggtggtgcacagcggcgaagagtgatcagcgttcgacaggaactgacagcgccggattacccaatggatgggtacgcgccgtaaagaacttcagcgccactccagccccgtcgaacaattgcgaataccgccgcttctgctgacgaataaacccatcgctgcgccccgacaccgagattgccagggttgtcacatcggcctggcgaatcgcatccaccaagtgctgatcctgctcccccagctcgtggccaaagatgcacagcgcgccctggtggttcagcagttgctcataacagaacgacaggtaatccgagctgcggatggtcttgagcttctcttgcaccttgccctcgctgacgaacagcggcacatcgtccagggtcttgatggtgttgttgatcgcaaaactgctgagcaaggtgctgtcggtggtcggcagtttgcgcgcggtgccgtcgaggttacgcaccaggtgcaggccgccgtgcaggtacaaaatacgcgtggcgtcggtacgggtgttgcgcaggtcgaagctggcgtcggcgctgcggaacaagtcgtcgatgcccggcgcgtgcagggtcgcccagtagttgagcaagtcgtagttgctggtgaacaccgtcgcgtagtgctgcaactccgtgttgagggtcgccagcgtcgacggttgcaccaggcgccaggggatatgcacggcgtggatggtattgatcaacgcttccttgatcgcgtaatagcggttgcgcggtgccgccgaactgacggccagggccttgttgacccggctggtggtcttcaacgcgcccagggcctgctcgaagctgcgggtttgcagggcatcgaacacgctgagttcggattggccgaggggtttttcttcgacggtgcgagcgttttcgaacagcgagtcgtaggcaaagtcttcccaaatcgtgcggctggcgccgttgccgatcagaatcccgctgaagtcgaggctcgcgcgcagtgcgctccagtcttcaaggtgggcgtctatatcctggaaatccttcatcggggcgggtctactcgaaatcggctggacggtgactttatcacgagcgagcgttgatcctgatcaagatgcagaacgcgtcatcggttgattctgtaggcataaagcctctgaggattgaccatgagcagcaccttcttcatccccgccgtcaacatcatgggcaccgactgcctcgacgaagccatgatcgccatccgcaactatggttttcgcaaggcgttgatcgtcaccgatgccggtctggccaaggccggcgtagccagcatgatcgccgagaaactggcgatgcaggacatcgattcggtgatctacgacggcgccaagcccaaccccaatgtggacaacgtcgagaaaggcctggcgctgttgcagcagagcgcctgcgatttcgtggtgtccctgggcggcggctcgccccacgactgcgccaagggtattgcgctgtgcgccaccaacggcgggcatatcggcgactacgaaggcgtcgaccaatcgagcaaaccgcaactgccgctggtggccatcaacaccaccgccggcaccgccagcgagatgacccgcttctgcatcatcaccgacgaaagccgccacgtgaaaatggccattgtcgaccgcaacgtcacgccgctgctgtcggtcaacgacccggcgctgatggtcggcatgcccaagggcctcaccgccgccaccggcatggacgcgttgacccacgccatcgaagcctacgtgtccaccgccgccacaccgatcaccgacgcctgtgcgatcaaggccatcgaactgatcagcgccaacctgcgcctggccgttcgcgacggcactgacaaggccgcacgggaaaacatggcctacgcgcagttcctcgccggcatggcgttcaacaatgcatccctgggtttcgtacatgccatggcccaccaactgggcggtttctacgacctgccccacggcgtgtgcaacgcggtgttgttgccccacgtacaaagcttcaacgccagcgtcagcgccaaacgcctgagcgacgtaggccgagcgttgggtgcggacatcaagggcatcaccgatgaagagggcgctcaggccgccatcgccgcgattcgcagcctggcccacgacgtcgaaatcccggcggggttgcgcgaactcggcgccaaactgcaggacattccactgctggcgagcaacgcgttgaaggatgcatgcggcctcaccaacccacgccgcgcggaccagcggcagatcgaggagatctttcgcagcgcgttttaatccatccgacaacgggcgacgcatatcgatgcggcgcccgccaacaccacacataaaaccgccaacggccaggcctgttgactcaccagcaggctcgccacgccgccgatcaacgcggccatcaactgatgcatgaagccgctcaacgccatggcgtaggagccgctcaccggtgaggcatcgttggccagggacaaactgatcgggtaactcatcgcttgccccagcaccgccacgcagtaaggcagccacagcaagacagcgattccgccagcaaacacactgctcagcaacatcacagccgttcccgttagaaccagggtcatgccccaacccatcattttcagccgccccgtgcgagcgacgaagcgattgaccattaatgcccccgccagatacgccacgctgattggccaacccagccagccatattgcgccgcgctccactcgaaacgcccttgcagaatcaacggtgcacaggtgttgaaggcgatgatcaccccataacccaggccaccgaccaacgccgcgtgcagaaacggcggatgctgcatgatcatggcgtagatacgccaggcagatgccgatgtatcgacctttacccgtgcagggaacatcacccggttcaacaccagcatcaaaccgactgcgccaatcgccaatccgtagaagatcgcctcccagccgaagaccacctgcaacaacgacccaacgaattgaccgatgcccaaagcaatcacgaaagtcatgcccagccatgtcaacgcttttgccagcaatgcaccgctgaagctgtcacgcaccaacacccgcgccatcaccgaaacaccgcctgcccccaacccttgaaccagccgcaacgccaagaagacttcaacgctgaacgccgagggaatcgccgcactcgctagcgcatacacgcagagcgccgccaacagcaccggcttacgcccaaagcgttcgcccaggctgccccacagcaacatcggcaatgccatgccgaccaagtagatcgccagcgccagcgcgacgtggtcttctgcggcggggagtgcatgtgcaatcgtggggacggcgggcaggtagctgctgatgccgagttgggcgaggaaggcggcactgcaggctatgacaagggtggtggtatttttcaagacgaggaaaccgccagcgtgagttctgaacaaatcgtcggaagtcgggttatatgaatcgtgccgtttgaaactcttcatttttgaagcgtgtgtaattcagcgagcacgtttattttcttctatcagactcaggagccttgagcaaaataaacgtattgtttcatgggtcatatctgctcgaagcgttatacgaattgcggcccttcctctgggaacaacagggaaaaatacagctgacgtgaagaagccactgtcggcgagttgtgctgcgattgtgttcgcttgttgcgcctcgccgcaggccacgagacggattgcagtactcgtgccgtactgcgcagtttcaataagtctgtcaaataattggatgttggcgaggagtttatcttgaagaagagtcagttccttcgtttggtgaatttttacagaggcaaagccagcgccaatagcggcagaatttagactctgggaccagttgctgggtccaccgtatcgatgcatgagacttttttgtttttcggtaccaaacataaccagtcctccactagcgccgaatgatttgccgagcgatgcaacgattaaggtttgatcgtctagcgtttgaaaattagggcggatgaagccttttcctttctccccaaaagccgacagagcatgcgagtcgtccagatataaaaatagaccatagcgggatttaaggtagatcaaaccgtcaatatccgcttttccacccatgctgtagatgccatcggctacgtaggcgactttcttgtgtttcttacatgattcttcaatgaagtctatgtcattatgcggcgctgttattacttctgtttcatccgcgcaggaggccttcatatagttcattgaatagtgagaatgtctgtcgaatatcatcgtaggggggacgtttttggtaaacgctccgctggcaagtaagggcagtaatccagcgctggccgcgctgcaagataaggtgctcagacagattgagtcgaaagcgttgaaagcgctgtttcatattgttcgagcatgtccagcttgcatctattttttgagttcgctactcgcagggtcttggctttgagtatcccttcgatagcgccatccagtatttgctggttgtaatcaagtccgaggtaggaggtggtgcagaaatgttgaagttcacggccgtattggtcggcaaagcagttgttgcttttgatgattgcattaagttcacaggttagtccttctttggccgattcccagtcttggttggaggtttgaatgatttttttatagtttgagaatttgttggttgacctggagctttccatttttctgtccttggcgatggagagaaataacactaatgggaatttttttgaaggttaagtcaggactttctttttgaggtggcagtcggcggatattttgatgtgtgtaacttcctacaattttcattggcgtgtattcatctgcactgaatgggtaacgagatcaaggcgttttttatcgtggtgtttcgagctatacccagaggcgtcgtacgatttgatgaagtcacctgtcaccctattgagtaaggtggtagtgcaagggcctaatgtgacgatagcctccgaagacctgtctctcaggtagtcaaaaccagcgggatgaagggagtagtagatgagagttctgttattcggtgccaccggcatggtcggccagggcgtgctgcgggagtgcctgctggccgccgacgtgcaggaagtggtcgccgtcggtcgtacgcccctgactcaggaacacggcaagctgcaccaggtgttgcacagcgacatgctggatttccaacccctggaaaacctgctgcaaggctttgatgcgtgtttcttctgcctcggcgtttcatcggcgggcatgaatgaagccaggtacacccacctcacctacgacctcaccctggtcgccgccagcaccctggcgcggctcaacccgcagatgacctttatctatgtgtccggcgccggtaccgacagttccgaggcgggcaagtcgatgtgggcacgggtcaagggcaagaccgagaacgccttgctgcgtctgccgttcaaggcggtgtatgtgtttcggccaggggtgatccagccgctgcatggcgtgcgctcgaagacgccgttgtatcagtggttttattccgtgcttgggccgttgctgtcgtttgtacggcggctgaaaccgggttgggtagtgagtaccgagacggtgggccgggccatgttgcaggcggccagccacggcgcgccgcagccggtggtggaacaggccgggatcaaccggctggccagcgagcgtcgctgatgctgcacaagagcctggtgcgtcggctggacttgatcacgctgcagctgttcgtcgcggtgttcgaggagggcacgctgacccgtgccgccaaccgcgaagccatcgccgtgtcggccgccagcaagcgcctgatggaactggagcaggtgctgggcgtgagcctgtttgtgcggcgggccaagggcatggacctgacggccgctggtgagaccctgctgcaccatgcgcggcagatgttgttcaacgtcgagaagatgggcctggaactgggcgaacacagccatggcgtgcgcggttatgtgcggatgctggccaatctgtcggcgatcattcagttcctgccggaagacctgcgggacttttccagactgcaccccgaagtcaaaaccgacctggaagaacgccccagcaaaggcgtggtgcagggcgtattggatggggtcgctgacctggggatctgctccagtgacaccgacaccaaaggcctgcccagcgtgacctatcgccacgacaaactggtggtgctgatgccgaaggatcacccgctggcaacgcgcgaaagcctggcgttcgtcgacacccttgacagcgattacgtcggcctgcacgccgccagttccatcaacatgcgcacccacgccgccgcccgcgaggcgggcaagctgctgcgcctgcgcattcatgtaccggggtttgatgcgatgtgccggatggttcaggcgaatatgggcatcggcatcctgccgcagaaggcgtacgaattgtttggtcgcgcactgggtttgcatgccgtaccgctgacggacgattggtcggatcgcagcctgatcctggtggtgcgtgatgaaacccagctgtcaccggtcagtcgattgttgttcgattatttgagcgttcgcgtttagcgaacgctgcttgccaactgacggttggatttctcctgcacctggcctctagtcttggccgcacattccaagaataagaggtgcaccccatgacggctcccctgagcggtatcaaggtgatcgagatcggcaccctgattgccgcgccgttcgccgcccggctgatggccgagtttggtgccgaggtgatcaagatcgaaaccatgggccagggcgacccacttcgcaaatggcgaaagctgcacgaaggcacgtcgctgtggtggtacctgcaatcgcgcaacaagaagtcactggcgctggacctcaagtcgccggaaggcctggacctgatcaagcaattgcttggcgatgccgacgtgctcatcgaaaacctgcgccccggcggcctggaaaagctcggcctcggctgggacgtgctgcatgcgctcaaccccaagctgaccctggtgcgtatctctggctatggccagaccggcccgtatcgcgaccgccctggcttcggtgccatcggcgaggccatgggcggcatccgctacaccaccggcaacccggactcgccaccggcgcgggtcggcgtaagcctgggcgattcgttggcgtcactgcatggcgtgatcggcgcgctgatgtcgctgctgcgggtcaagaccggccagggcgacgggcagattgtcgatgtgtcgctggccgaaagtgtgttcaacctgatggaaagcctggtgccggaatacgacatgctcggccatgtgcgtgaacgcagcggcggcgccttgccgggcattgcgccgtccaacacctacctgaccgccgacggggcttatgtggtgatcgccggcaacagcgacccgatctacaagcgcctgatgcacaccatcggccgcgccgacctggccgaagcccccgagtttgcccacaacgatggccgcgccgccaagagtggtctgctcgacgccgcgatcacccactggaccagcagcctgcccatcgagcaggtgctcagcgccctggaagccgccgaagtgccggccggacgcatctactccgtggcggatatcgtcagcgacccgcactaccaggcgcgtgagatgttgctcaatgccgagctgcccggcggtgtgtcggtgaagatgccgggcatcgtgcccaaactctcggagacccccggcggtgtgaactggcaaggcccgaccctgggccaacacaccgacgaaattcttggcagcctgggcctggccggtgccgatatccaacgcctgaaaacctcgggagtggtgcaatgatcacagactattgcgacccgctgatcgtgcaggaagtctccccgcgtgacggcctgcaaatcgagccaacctgggtcgaaacagcggataagatcgccttgatcgatcaactgtccctcgccggtttttcgcggatcgaagccggttcgttcgtttcacccaaagccatcccggcattgcgcgatggtgagcaggtgttccagggtatcgaccgcaagccgggtgtgatctacgtcgcgctgatccccaacctcaagggcgcccagcgcgccgtcgagtcccgcgccgatgagttgaacctggtgatgtccgccagccagacccacaacctggccaatctgcgtatgcgttgcgaagcctcgttggcggcgtttggcgacatcacacggtttgccgccgagcatccggtaacgctcaacggcagcatcgccaccaccttcggttgcccgttcgagggcaggatcgacgaagaccgcgtgctgcagatcgttgacgcttatctcgagctgggcatccagggcatcagcctggctgacaccacaggcatggctaatccgcgtcaggtggagcgcctggtcaagcgcgtgctgcagcgcgtatccgcccgtgacctgaccctgcattttcacaacacccgcggcttgggcctgtgcaatgtgctggctgcctatgaggctggtgcccgtcgctttgacgcggcgctcggcggtttgggcggctgcccgtttgcgccgggggcttcgggcaatatctgcaccgaagacctggtgaacctgtgcgaagaagtcgggattcacaccgggatcgacctgccgcacctgctgcacatgtcccgccgcttgccagccctgttgggccacgagctgcctggccaggtggccaaggccgggcgcaattgcgacctgcatgcgccaccggcctacatcgccacgctgtaacgccgtaccagacaacaaaaacaatcgggcgccgctgagcagcccgctggagagaaaccatgagcactaatacgttggaggctggcgtgcgcccggccgctgaaatcgatgccgaaaaagccctggtcagcaaggtcgcctggcgcctgatgccgctgatcatggtgtgctacctgttcgcgttttttgaccggatcaacatcagctttgccaagtttcagctgcaagcggacctgagcctgagcgacaccgcctatggcctgggtgccggattgttcgtggtgggatatgtgatctttgaagtgccgagcaacatgatgctgtacagggtcggtgcccggcgctggattgcacggatcatgatgtcgtggggcctggccacggcggccatggtgtttgttacggccgaatggcagttctacgggctgcgcttcatcatcggcgcgatggaggcggggttcgcgccgggcgtgctgtattacctgacgttgtggtttccgcagcacttccgcgggcgcatcacgtcgatgctgttcctggcctcggcgtttgccggcctggtaggcgctccgttttctgggctggtgctggaacacctcgacggggtgttgcaaatgcgcggctggcattggttgttcctgctcggcggcttgccctgtatcggcctggggttcctggtgctgacgttgctcaaggatcgcatcgaagacgcccactggctgacggcggcggagaagaccctgctgtcgagccgcatcgccaagcatgagccgaaccagcacggcggttcgttgctgtcggcgatccgcatccctggcttcctgatgctcggttttatctacttcctgatccaggtggcgtcctacggcctcaacttctgggcgccgcaattgatccgcagcgccggtacccagagcccggtgatgatcggcctgctcacggcgattccctatgtgtgcggcgccatcagcatggtggtgatcgggcgcctgtcggatgccaccggcgagcggcgcaagtttgtctgcgggctggtggtgctgggggcggtaggcttcttcagtgccgggatttttgccgaccacactaccttcctgatcattgccctgggcatgttgggcgccggcatcattgcctcgatcccgaccttctggaccctgccgcccaagctgctggccggcgccggtgccggcgcggcgggaggcattgcggtgatcaataccctcgggcagttcggcggcattgtcagcccggtgatggtggggcggatcaaggatctcaccggcagcaccaccccggcgctttacgtgatcggtgtgtgtgcgctgttggcggcggcgctgttgctgtggggactgccgcagaagttgcgcaccctcgataaaggctgatcttgaccgcaaccccgctgattggaggaggaccgttcgtcgcaccagcgagttttttctaaacctttaccgccctcaaaattcgaaatgagggcggggtgtattccccggcccctatttttgccctggaggaacccatcatgagccgcatggctatccggttacgcaccgccagtttcgcgatgctgctgggcctcggcgccagcaatgccttcgcccaatcgcctgctgaattcatcgagcaggcttcggccaaaggcatggccgatatcgaaaccagtcgcatggcccacgccaagacctcgtcccaggaaatcaaggactacaccatcgaggtgatcaacgagcgcaccctggccaaccagcacctggcggccatcgccaagaagctcgatttgcccgtggcgccgcgcgagaagatcgtcgataaagccgaaaccctgatgccagaactcaaggacggcgactccttcgatgcggcctacacggcgcagcaggtgaaggaaaatgaagacgccatcgccttgttcaagcaggaaggcgcggcgtcggatgtgccggaaatcaaagccctggtcgatgagacgttgcccaagctggaagagcgtctgcaaaaggctcgtgccttggcgtcgacctatggcaaaggccatcaaggcgacggttgaacctgttacttgaattgaaaaacggcggttggatcatctccaaccgccgttttttataggctttgctagaacgccatttccgcctggccggtgccctccagcgcgagcaagtattgcttggcttccaaacctccggcaaagcccgtcaagccacctgaggcgccgatcacccgatggcacggcgcaatgattgaaatcgggttgcgcccgttggctgcgcccactgcacggacggcctttgggttgccgatctgctgggcaatctggctgtagctgcgagtttcgccaaagggaatggtcagcagcgcctgccagacctgcttctgaaaatcggtgccggtaaactccagctccaggtcgaactggttgcgggtgccggcaaagtactcgtgcaactggcgttcggtttccagcaacaccgggctgccattggcctcgtgcagctcacccaggcgcacacggttggcgcgttcctcttcccagaggatggcactgagcttgccagcacgcgccacgagggtgagtacgccgacaggcgaaggcatgagcttgtattcgtaggacatgagcgggctcctgggtgggcggggtagcgttgaatctagaacacgccgcccaacgagaaactacgtttcttgcgattgaattcggtttgttcagtggtcttgctgcaacactttaagcgccgctgaggccagaaagccggaacggcttttttcttccgggtggtgcagcacatattcatcgatgcggttcaacagataaccgggcagcgtgatgttgagcttctgcgccttgcccaggtacttggtgacatcaatgtccaccaccgcccaggtgcaacctgcatagtgagggttggcggcgtgcaaggtgaccttttgcgcactgggaatcggtgcaccgtcttccgccaggatttcgaaatgtccttcaatggcttcgcgggccatggccatggcgtcgtccaagtcgtcgccggcggagtagcagccgggaatatccgggacttctacgccccaggcgtggtcgtcgtcgccggttgaaattgcaatcgggtaaagcatgtctgttgtcctccacggacggttaactcagcagagcctgtttcaaaatgctcttggcggtcttgtccaacaggtccttctttggatggggaatcgtcaccagccccggttttgtcgggtgcttgaagtggtggtggctgcctctgatacgtaccagataccaaccgtccgcaacgatgtgacctatcaaatatcggctatccacaacacctccttgtggtgtgtgatggtggtgactataaccactgaattgaaattatcaacactctacctaccagtggtcgatgaccggcattttggcaggtggtcaatggagtgtatgagcgcgacggaatggcgctgcacagaggtattgcgaggttttgcagcggcgttaccgggccggtagcgtctgtgcaatgacggcgagaaacgcatcaaccagcacactttttgtttctgcgcgggtcagtaccaacagctgcgcacacgcatccgcttccaccagcggcctgtacgtcacgcctttattcatcaggctctgcgtacacgccggcaccaacgccacgccttgcccggcggccaccagcgcaatgatcgaggtgatttgccgcccggtcgggcctgggcgtagcggctggccgtggtggcggtaaagctgttcgatggactggttgagccccgagccataatccgctggaaacagaatcaacgggtaggtactgagctgcgccaggctgacgtcgggttgattggccagcgggctgtccctggacacggcggccaccaagggttcctcgcccagggacagcgcttgcaccgcttcgccttgcggcaacaggcggctcaggccgatatccagccgcccatccgccacttgcgcacccaggctgcccgaggcgcattccaccagggtcaattgcacatcgggaaagcgttgggcaaacgcctggatcgcctggctgaacaggtccgacagggcgatcgaactgacatagcccaacgccagttgcccggccgtacctgccgcgagtttgccggcgatcacctgtgccaattccacctgctccagtacgccgcgtgcatagggcaggaatgcgcggccttgcgcggtgagggtgaccgtgcggctggtgcggtcgaacagcttgaagcccagctcggtttccagcgccgagatctgtcgcgtcagcggcggctgcgccaggtgcaggcgaatggcggcgcggccgaagtgcaattcttcggcgacggtcagaaagtaacgcagcttgcgtaggtcgagcatcctggtccttgggtatcgatcggtccgaaatcggtattggttcaagacctgccggccattctataaagacctcacaaaataaaacgagaggtttcatgaaaccgcgcctgcattgtgcccgtcttgccctgttcctgtgtggctgcgcggcgttcctcaacctgtatgccacacagagcattctccagacatttgctacgcagtttcacatcagcgccaaggcggcggggtggagcatcaccgtgacgacgctggccgtggcgatcactgcgccgtttgtcagccgcctgaccgggcgcttcgaaccacgcacggtgatcagcgcagcggctttgctgttggcgctgccgtcactgatgaccgcctgggccgacagctttgccgaagtgttggtgtggcggtgtgtggcggggatgttgatcccggtggtattcgccaccagcgtggcgtatatcggcgaccgctggcgtggcggtacgctgacggaagtcaccagcctgtatgtggcagggaccgtgctgggtgggttcgccgggcgtttcatcaccggcgtcgtgactgaatatgtcggctggcgcgaagcctttgaatggctggcggtgctgagcctgatggtgggtgggtttatccagtttctgttgccgatgagtcgtgtgcgctccgagaaggttcaaccctcgttctcggcggtttttagcaagcccttgctggctgcctacgccgtaggattttgcgtgctgttctcccaggttgccgcgtttacctacgcagggttgtacctcggattaccgccgttcaacctggggcctgcggcgttgggtacgctgtacatggtgttcctgctggcgctgatcgtcatccccatcgccgggcgcctcagcaaatcccggccccacgccgaactgctgagtgtggctgcgctgctgggcatcagcggctcggcgctgacgctggtgccttccttgtggtgcatcgtggtgggcctggccctcagttctaccggcgtattcctcgcgcagtcggcggccaacgcgttcaccacggcgacggcccgtgacaataaagcaggcgctgtgggggtgtacctgacgtgttactacctgggcggcagttgcggcgccattgtcccggcattgatctgggaacgctggggctgggccgggtgtgtggcgctgattatcaccttccaggtgttgaccttgctgatcgccctgaccggctggaaacccgccaaacctcaactgatcccgacgccatgaatgccatcccaccccgccgtcgcacgctgatcgccggctgctgcgcccacgccgtgcatgacggcctgaccgatgtcatctacgtgctgctgccgatctggcaaacacagttcgccttgtcctacgcccaggtcgggctgttgcgcggtgcctattccgggatgatggcggtgttccagctcatggccagccgcgctgcaaaacgctggggccgagtgccgatgctggtcggcggaaccgcgctcgccggcgcggcttacctgttggtgggccaggccaccgggctggtgatgctgttgctggcgctgctgctcggtgggctgggggcgagtagccaacacccgctggcgtcttcgatgatcagcgatgcctatgaggacggtggcggaatcaagcaggcgttgtcccagtacaacttctgcggcgacatcggcaaaaccctgatccccggcctggtgggcctgttgctcacggtgatcagttggcgcgccagtgccacgttgctggggttgctggggttggcggcggcggggttgctgtggtggcttgttccggcgcaaacatccgaatcgtcctcgaccaaaaaagccaaacctttcactggaacaggctccgtcaccggcctgcgcgcactgatcctcaccggcaccctcgacagtgctgtgcgcatgggctttctcaccttcctgccgtttctgctgcaaggcaagggggcgggcaccgccggtattggcctggccctgacactgctgtttatcggcggggcgttcggcaaattattctgcggctacttgggcgcacgcatcggcatgctgaagacggtgtggttgacggagggcagcacggcgctgctgatcgtcgcggcggtgtacctgccgctggacgggttgatggtgatgttgccggtgctggggctggtgctcaatggcacgtcttcagtgctgtacggcgcggtgcccgatctggcgccagccgagaaacgcgaacaggcgttcgccgtgttctacaccggcacgattggtggcggggcgctggcgcccgtggtgttcggcggggtgggggatgcgctgggggtgacggtggcggtgatgctgctggccggggtgttgggggtgacgttgccgttggcgtgggtgattcgcagaggaatgcaactggacggttgataactttttctgacccgaatttcagttccatcctacgtcaggatacagaaggcgaaactgtacagttcggtcttcaaaaatcgcggcgcatgtttcgcatgcctatcagtgagtgaggagtggccgttgcttgataggaagcgatcagactaagctttctatgcgccaatgacgtataggcgtgaatatgatatttatcgagtcacccgcatttacagaagatctgctagggcttctgagtgaggaaagctacggtgaattccaagcgtttttggccgaaaatcccatctccggtgatgtcattcaaggcaccaatggcttgagaaaaatccggtgggccgtgcggggaaggggaaagagcggaggcgtcagagtgatttattatcatgtctgcaaggcctatcaaatcaggttgatcttgatctaccggaagggcattaaagatgacctttcgctggcgcagagaagtgttctgagtgaaataaacagaaggtgggaatgatggagaaaaaactgttcaaccgtctggtcgaaagtttgattcagatggatgagatcgtaagtggcgagcgatctccttctcgcgaattttttgttgatgcgttgaaggtaaaagagattcgacaagccactgggctttcccaagcgggctttgcaaaggcgattgacgtgcctgtaggaacacttcagaactgggagcaagggcgacgtgagccagaagggccggctagagcattgcttcgtgccttacacaacgaccctagtcacgtattggcagcgctggagcatcgataatttccgaggttgtgccttttaagtaaatgaaaaccggctggctgaagccggtttttctgtttgagctgcctgcatcggcgtaatgccctgcgcccttttttcaagttttgcgacattgcctacaccaccttcggaacacgttgggttgtataccatggcatgggctatttatggtttctcagccgctacatcggcacttgatggcaactgcacccagggcaccctggagtgtgccggtatcccgaaagctacccggctcactcgcctgcgtgcagttgccaccctcccgaatcatcaaattcaacgcataaaaaatctatggtcacccccatttttgcaatactgattaacgggtggtgtggttggcttgcttaaatctatccggcgtctgtttggggcttgccccagcgccacgatgagagtcgcgcc

SEQ ID NO: 70 - DNA, 113317 bp, Pseudomonas nodulensis
  misc_feature (56806)..(56814): n is a, c, g, or t
tttgccgagatcgatcccgatcagtgctgactcgctcatgatgatggcctccgaaaacaaaacaccctgtgaaagcgtagccctcacagggtgttgggggtgaccatctcattaaccggccaccaaggaccggtttttttgcatccctcgtctgaaacaacctgacgcgaaacgagaatctgagtggagcgggtagagggaatcgaaccctcgtcggaagcttgggaagctactgttctaccattaaactatacccgctcagagcggctgactttgtaccagaagttcgccgggatttgaagtttttcttcaaaaaaatgtgtgggttacagatgtcccacacatcgacaagcgaacccattgtaggagcgagcttgctcgcgaaagactcaagagcgccgcgttctctcaggagacgagcgttatcgttgacgttcttcgcgggcaagcccgctcctacaacgggtcgtgtttcagagtgcgaaggcatgttgtgccgggccggtttgatagcgcaatcggctgacctggcgctccggtttcaagaagcccaccaccgcatcccggctgtcccggcaggctgccttgtgctccatgtccaggaaatgccccgtggcctggatcgtgctgaagctgctcttcgccacatgctggccaaacagtttggcgtcctgtgcgctggtgtactcgtcccattcgccattcaaaaacagcactggaatgtcgatctgcttggccgccttgaggtagcacaggcggtcactgttgagcacatggctgatgtgaaagtgcatctgcccatactcgtgttctgccaggctgctcacgtgcttgtagttgaagcgcttgaacaacgacggcaggtgtttgccgatggtgctgttgaccaggtggccgacgcggtcgcggtcgaggttgccgaggtagtcgacgccgcgctccaggtagtcgcgcatgggcgcgttgatcactggcgagaacgaactgatcacggctttttccacgcgacgtggccggtgggcgagggcgaccagggtggcggcaccgccccaggaaaacgacagcacatgttccgcggcaaaatggtcgatgagttccagcaggatctggccttcgacttccttcgtcagcatctgctcatggcggttatggattttggagcgaccggcgtagggctggtcgtacaaaaccacattgaactgcgggtacaggcttttcacggtttgggcgaaggatgccgtggtggccatggagccgttgaccaggatgatggtctttgcagcaacgtccgcgcgatagaactccgtgtaaacccgatactgaccctgtatatccaacacagcgatttctggcctcatgtcgtaagactcctggcaagcgggtagggcgcgcagatcactctgcacgagctttgtgacaggtaggcatacgcctggaaaaggagggcccatgtcgatccgatgacggctggccgacggctgttgttatggcgggctgtttgcctggaaggcccgtagatcaagcgcgggcggggcaaggtgtttcttggaggttataagcgactcgccagtcatagttgaactggtgatcctgattcaagcagtcgaggcggcacctcgcaaggtgacttggcggttttttgccatcaccggccgaacggtcgtcagacctgtcggatttcgtcgtcagtcagcgcccgatactggcccggcgcaagggtcgcatccagcaccagaggccccatgcgctcgcggtgcaggccgatgaccttgttatcaaagtgcccgaacatgcgcttcacctggtgataacgcccttcgatgatgctcagccgtgcggttcttggccctagcaattccaattcggcgggttgagtggtcaggtcttcgaaggcgaagtacagaccctcggcaaatgtcgttgcgtattcagggccgatagcctgttcggtctcgacgaggtacaccttgggcaacttggtctgcggttgcgtcaagcgccgcgaccattggccgtcgttggtgatcagcatcaggccggtggtgttgaaatccagacggccggcaatgtgcaattcgcctttgtccggctcatcgagtaaatccagaacggttggatgttgcggatcagaggtggcgctcacgcaacctaggggcttgtgcagcatgaagtaacgcgccggtttgcctgcctgtagcacctcgtcgtcaacgctcactcggctgaattcccgcacctcgtgatggggatcgctgacagccacgccatccaccgccacacgccgctcaaccaacagcaggcgcacttgcttgcgattgaaacgcggcaggttactgaggaaacgatccacccgcattacgtcggctcaaccctacgcaactgttcatcgacctgggcacaacgcgggcacaggcaggcctggttgcgcagttcatcgggcagggcctggagcacggccgggtcgatggtgacgctgtagcaccagcaggcctggtcgaccgtacgtgggtcagccaggctgcagtcgttgcgtgcaccgcaggcggggcaaagggtgggtgtggtcatgggctagtcgggcaaggttgcggatgattccgctaggccctgtacgatacagggccgtccccgcccaggccactcagagctggaacttgctgaccagtacgttgaacgaggtggccaggcgcgacaggtcctggctggaggcgttggtctgatgggcgccggccgccgtctgggtggacaggtcctggatgttcagcaggttgcggtccacttcgcgggcgacctgggcctgttcttccgaggccgaggcgatcaccaggttgcgttcattgatcttcgccacgctggtggtgatccgttgcagggcttcgccggcgttctgcgccagggtctgggtgttgttggcccaggtcaggctcttgttcatcgccgcgaccgcatcatcggcgccggtctgcacttcaccaatcatcttttcaatatcgaccgtggacgtctgggtgcgatgggccagtgcgcgtacttcatcggcaaccacggcaaaaccgcgaccttgctcacccgcacgcgccgcttcaatggccgcattgagtgccagcaggttggtctggtcggcgatgccacggatcacatcgatcaccttgccgatctcccgcacctgcccggcgaggtctgccaccgactgcgtggagtcgttgatctcaaccaccatcgagctcatgccggacacggcctgttccacttgctggcgaccctcttcggcctcggtggtggcctggcgcgaggcttctgaggtcgagacggcgttgctggccacttcgtccacggcggcggtcatctggttgacggcggtggccgcttgttggatttcatcgttctggcgggtcaggccacggctgctttcatcggtgaccgcactcagttcctcggcggccgacgcaagctggtcggacgcgttggcgatttccaccagagtgcttttcaagccgccttgcatatccgagagcgccatcagcagttgcccggcctcgtcggtgcgttcggtgatgatggcttgggtcaggtcaccctgggcaatacgttgtgcgctagccacggcctgggcgatggggcgggtgatcaggcgggtgatcaacatgccaatggtcaaggcgatgatgaaggccagcacaatgccgctgatcatccacgtcaacgcgctgctgcgcagttcatccgcagcggcggcgccttccttgatctggcggttattggattcgaccatcacgcggatcagctcgcgcgcctggcggaagagctcattgttggtggtattgagctgggtgcgggcctgatcgagttggccaccgtcgagcagcgccatgatgcggtctgagctgctgatgtaagtgggccagagttggtcgagtttgtcgccggctgcccgttcgtcgtcttccagcggggttgcgcggtaggtggcgtacgcggtctggctgcgcttgagttcctgggcgatatcctgacgcacacgttcgcgatcctgggcggaaacgtcaccgttgctggcgtccagcaagcggtacaggccgcggttatgggcgaccagaccgttgagggtggcggcagtggtgcttaccgagaccaggttgttggagaatgttgactccaacgccgtggagaggcgaaccacgcctttgatgcccagcaggcccacccccagggtgaccagcgcgcacaggaggaatgagagcagcagtttggttgatattttcatgagtcgggtccgggcagggtagcgaagggtgcacgctagagcctccctggctcttggcgatgtcattgtgacatcatcgcaattgacaaagttgcgagccagataaatttactgaatcgataaagcttgcgcagatgtatcaacctattacgaaaacgcaccagattccttttttgatgtcagatatttcgtcattcaatgaaagttgaatgccgccctccagcgtcgctggaggtgctcttccgcggtccaggaggccgccatgtatcgacgactgctgctcagcgctttactcggtctgaccctctctgcttgtgtgccctattacgatggaggccagagctactatcgatccgaggtctacacctcaccggcgccggcgtattactacgggggtggctcggcgtatcaataccgccgtgactactaccccgcgccgcgctattacgcaccacaaccgcgttattactcggccccgcgttattaccagccggcgccacgctactacgggccgcgtgccggttatcgggcgtacccgaaccagggctggggcggagggcattggggtaatgggggtgggcacggtcgcggttccgaccatggaggtggccgcggcggtcaccgttgatgggcctgcacggcaagcggcgcatgaagcgccgcttttttatggagaagtatcagtaatcggacaggtccgccaacgggtggcggccttcccacgccttgtcgaagtgagcctgcaccaccgcctcaggaacggtgttgatatccggccagtgccaatgcggcgtctggtctttgtcgatcaaccgcgcacgcaccccttcgctgaattcaggatgacggcagcaattgaggctcagggtgtattccatctggaacacctgggccagcgacaggtgccgggcgcgctggatctgttcccacaccagatgggcggtcagtgggcagccttcgctcaacgtcttgccggcacggcttaacagtggatcggcatgctcgctcagcaggctcaaggcgcgccaggcacaccgcacatcgcctacatccagccattcgtcgatctgcgcccggcgcggtaaccactgtgcttcgggttgctgaccggcggcttcctgcgccagcgccttgagcaggctgttgagctgcatcggggtctgttcctgccagttcagttgcagcaggccatcgagcagttcgtcctgctgatcgtcacgcaggaagcggtcggccaggcccaggtccaacgcgtcacgcccgttgatatgcgcaccggtcaggccgaggaacaacccgagcttgcccggcaggcgcgacaggaaccaactggcgccgacatccgggtacaggccgatactgatctccggcatggccagccggctgctcggcgtgacgatgcggatcgccgcactttgcaacaggcccatgccgccgcccagcacgtagccgtggccccagcagatcaccggtttcgggtaggtgtgcaggcggtaatcaaggcgatactccgccgcaaagaactgtgccgccagcgctggcacaacgcctggctgttcgcggcaagcctgcgccaggctgcgcacttcgccaccggcgcaaaacgccttggggccgttgccgcgcagcagcacgcagacgatgttcgggtctttggcccaggtgtctaggcgttcgctcaacgcgaggatcatcgggtgggaaagggcattgagggacttttcagcgtcgaggctggcgatgccgatgcgggcgccgtcgctgccggtcagctcttcgaagtgcaggttcatcgtgacctcaatcgagaaggtgaaggatgagtatgatcgcttcgcaggaaaatgcgggtggtgtgtcagatcaattgacaagcggggtcggctttcctagggttcgcctcattctttttgacaagactattcaaccatgaccgaagacgaccgtatcaaactcgaacccagctggaaacacgccctgcgggatcagttcgagctgccgtacatggcccagttgcgcgagttcctgcgccaggaacatgccgccggcaaagagatctacccgcccggcccgctgattttcaacgcgctcaactccacaccgctggacaaggtcaaggtggtgatcctcggccaggacccgtaccacggccccggccaggcccacggcttgtgcttctcggtgcaaccgggcatcccgacgccgccatcgctgctcaatatctataaagagctcaagcgcgacctgaacatcgacatccccaaccatggctacctgcaaagctgggccgaccagggcgtgctgatgctcaataccaccatgaccgtcgaacgtgccaacgccaacgcccatgcgggcaagggctggcagttctttaccgatcggattatcgaagtggtcagcgagcatcagccgcacttggtgttcctgctgtggggtgcccatgcccagggcaagcagaagctgatcgacgcgaccaagcacctggtgttgacgtcggtgcacccgtcgccgttgtcggcgtatcgcgggtttttggggtgtgggcatttcagccggaccaacaagtttcttgagcagaacggcgagacgccgatcgagtggcggttaccgccggtctgattgaaaagggcggtgcaatgccgcctgtaccgcgtctactcgttgtttcgacacgggcctcacttttttgcatgcttcagagcgcaggggtacctgttagttctgacagtattcatggtcagttcaagcgcattaactactcttctcggccgtgggggctggtgcataccagctcttggtcgacggcggcttactgctgattaccaaggagattagatatgactagacccactgtaacgactccaatgctcgctcgagccagggctcctggggttcttgaagcagatgccccggtggcgccggatgcgttgcccctgtgggctgacgatgttggtttcaagatcccggtgccctttcaaagtacggggttgccagtccaggtacccaccctgtggggtgggactggcgttctgttccctggcgatataactgccgttgtctggtactgggatggcgtaccgtttgacaccaagcgggtggaggcaccttacgatgccaccgacttacctctcgttgacgcggtggtaccgccccatctgatggatgccgctggcttgcataacttgcactatgaagtgttgcttagggaaagcagtgggaaccccggcgagccgtcttttgtaaccgtgctggacagcgacaaggtcgggcccaatcaggggcagcgtggcccacggctgcgatttccacctgaaattgaacaagacggtgtcactgatgattacctgaatgaccccgccaataacgaccaggtggtgggcaccgtcgtttccactactacgcctgcctggctggacatgcgattaggcgatgttgttgaagcctacctggctcttttgcctttgcgtcggcccttgcgcaggcatccacggcaacaggatattgttgccacaaccaccatcacccaagcacacaaagatggagcgcccgttgaggtgattttccccggggacgtcctgcgtggtctggcgtccaatcgagagtacaacgcacactactggctgcgagaccgggcaggtcgcgaatcgggtccgtcatttaccagcgtgttgtatatcaatttggcagtaacacctactgagctgcgcccggtcgatctgcctcagttgaacgacggacgtatcacactaagcgatgcccgcgagcccggtggtgtgttcatgaatattcttgaaatattcggctctgcgccgggggacattctgcgtcctctctggaactttattcctctgcctgaaattgagattgcggctattcaggcttggcccatccgcgtgccaatcccgtattctgtcctcgccacaggtggttttgaggtgacgccggggacgattcgggcgggttatacatgggagcgaggatcggcgacgcccagggactcgcaacctcgatttgtccctgtcaacttgacggttgccggccaagtcagcccagacaatccggacccgatcaaccgcttgctggagaccgtcacggtcaaggggcgagacggcgacaacctgctgaccctcaatgacgtgggcctccctgttcgggtcgtgaccttgttgttcgacgagcctaatgccaacgaaaccttggagctgatggtaggtaaccatccggtaccgttggccacctataccgtgcagctcaccgacgtcgccgggcaggagatcgagttttttgtcgactgggctgatttggcacccattgttggtaacggcggcatcttcgcgttcttctattggacctttaacggagtgaaccgccagcgtgccgaggacaccccggtgattgtcaacattgtgcccatcgtcgggttgcaggacctggagtacgttggcgtcacctatggaccggggcctgatgcagggtttatcagttgcccattgaggccttgggttaacggtgtaggtgtcttcattccgggggacgctagcttgctggaaggcggtgacgaagtggttctcgagtgggccagttacgcaaaccccaacggtcatccgagtggcgtcatgcccgaaacgattaacacattttcccatacgttgagtcccgcagaggctcgggatggttatgagttcagggttcccttcgacccctacatcctgcatccagggttggtgcaaccacctaccgggcaaacaaatcctagacatggttcagccatagcgcggtaccgggtgatgaaacccgcaggaggcgggatggggtggtctcctcgcaggttggtggccattaagttgatccgcctaaatggccttccgccttgcacttcggatgattgaagccgcgcgcacgggcgttacacccgtgcgcgattcaaacgctcggcacctgtcaagtttgacagttacgggtgatcgaaaactcacatttaatggacacgagatcagcaggttcgcaagaccaggtagttgtcggtcgtagttcgttcttcccgatagacggcccggggtgaccggggtgaaaacttgttcctaccaggagtgtgcaccatgtccaacaagccccaaaacatcatcaataaaaaaacgtccgcacaaccgcagtttcccacggaagattgggaagaccccgtcattgatcccacacttgagcctgcccctttgatcgacgggttgttacccgctattcctggggactcacataggaatattgtggacagggacatgcaactgcggggcgtggtgctgtccctccggctgtgggatcggagtggctttctcaatgactttgaaacactcaccatatacgtcaacgaaaggcctatcgagatcatgacctatgaccacaccgacgatctgacagaccctgtgacggtggatctggggcctaaatccgcgttgcagactcatggcatcaaggacatccgggtgcatgtaatcaatttcggtggcaatgacgttaactacaacattcgccgggtctatgtggatgcgcaggaccctaactacaacaaccaacctaatttgatcagactggaagattacggttcggaactgactcctgctgacttggagggaaaagacggtcttgaattcactattcctgatcctgccgatcgtcgcgggggagatatttatagggtttatgtcgggacgatcgaacaccccttggagaatagcgttccgctgaccggagacattgtggggaccattcccaccacgatgatcctggcaaagtcaggcgaaatccccgtgcagtacagcctggaggatcgttctggtaacatctccgtcctctcccttccggcttatgtgcgggtcagtctcaacgatccaccggacttcggtgatgtcaaggtgctggaagagcccctggtcgataaagaggaagcccgcaacggtgcgacggtgcaactggaaaacctcaccggctatctgccgtctgatatcttggtggttcgctggggaacggttgagatctaccggcaagccctcggcatggccatcttcccgctggacattcccgcgccgtttgcggccattgcggcgggcggggaattttacactgcggacattaaactcactgttgaacgccaggacggtagcacttacccagggccagacacgcaggtagacgtcgacctgcgtgagccgggcgtcaccaacccgggcgaaggcccggtagaccccaacctggccaagcctgatctgattggcggagggccgctgccaaggccactcaaccgtctttcggaaaaggaccgtggatttgatgccaccgcaaccttcttgttgccacccggcctggaggcaggtgatttcattgactttgtctatgcgggcattgttgtcgccacctatcctgtgacaggggccgaagccccagactttatcgtgacggttaccgtggactgggttgatatcggtgagacggggaacggtactattccccttttctgcctcatccgtgatgcggtcaattacaaacattcgccacatcaagacgtcttcgtggacatcttcaatctggaggggctggccgatgcgatctttagtaacgcccagcctgttaccggccagacgaacttcagctactacatcaattgcacaagaagtccttggctagatgtgcccatcaaggtcctggattctggattgctccagatcgacgatgaagtgatgattgaggcggtcaggtatgcgtatgtcccacctactgcaccgatcggtgtgcctgtcggtacgcccatagagagtgcgtggttcacactcaacagttccgatgtcaatcttggtctggttgtgccaatggatttgagtgcctggttcgaagaccacacgggtacttcagggcgaggctatgttggcgtgcgctggaaacttcatcgcccctcgacagaagatcggggcatctccgatgaggtcagggcggcctgggacctcgtcggtactggcggtggtgtgccgggtagttgcgttccgggggcgtcacgtcgtaacggtacgctttgaagcaacgttgaagcctcatcctttctgattgaaagggtgaggcttttttgtgtaatgacctttagtcgctacccgcgtgaccttaaggaaagtcctacagggcttgggaggtcaggtctttagtctctgcgccgaagaaaacggaaacctattcgatacggggtccggattcgaactggtatttacttctgaggctacttggcatgacttctattacttcccatcgttttcgcttgtcgcgtttatcgtcaatcatcaaactcatggcggttgccccgctctacttactgagcgagcaagcactctccgcggtcgtcgtagacggtaacgtcggtagcggcaaacatgacgtctatcccggtataggcgctaccgattacattgcccagaacggtgcgacgctcactgtccacgacggcgcgacggtcaaggaaatccgtgctacgaccggctccaatctgaccatgaccggtgccaccgtgacctcggcacacgcctcccaggcggcgattaccctggccaactcgaacgcagtcatcaccggcacaaagattaccagccatttcagcggcggcttgaacgtggctcgccagccgggcacgacgactggttcctacgcacaggtcaatggcagcgaagtcatcggtgcgacctggggagccaacgtcacctcccatagcctgctggaattgaataactctacgttgacagggcaaagccggcagggcctggtgctgcaggggggcgcggcgattgcaaccggcagtgaaattacaggggctaccagtggtgtggtaatgacgggtgagagcctgagcgtgcctgcgacgcctcaattgaccctggacggttcgcgggtggttgggctcaatggtccggcaatcagcgtagagcgaccgttcactgctgaaatcgacgtgcgcaatggctccaccctggtcggcggcaacggcaacatgctcgagctgacgggtggcggcaacgccaacatgcgcgtcaacaacagcgccctgaccggcaacatccaagtgggcaccggcagcgccctggacctgagcctcgaccacgccatcatgaacggcgacgtgatcaacaacggcggcagcgccagcgttggcctgagcaacggctcgatcctcactggccgtctggagaacgtcgacaagctggcgatcaacagcgacgcgacctgggtgatggtcgacaaccagcaagtgggcgacctggccctgagcggcggtaacgtcaagtttggcgacccgggcgtgttctaccaactggacgtggaaaacctgtcgggcaacggcaccttcatcatgacggcggatttctccacgttgaccggtgacttccttaacgtcaccgggacgtcgtcgggtgatcacaaactgctgatcgccagcagcggtgccgacccgttgagcgatgaccgcctgcacgtggtgcacaccgccgatggcggcgccaagttcagcctgctgggtgaccgtgtggacgtgggcacatactcctacagcctggtcaacgacaacgaaggcaaagactggctgctggacccgggcagcaaggtgatcagcccgagcacccactccgtactggccctggccaacgcggcgccgagcgtgctctacggtgaaatgaccaacctgcgtacccgaatgggtgagttgcgccacagcgatggtaagtccagcggcttgtggagccgtacgtacggcaacaagtttgaagtgaacaaccgcgataaaggtgtgcagtacaaccaggtacagcgtggttttaccctgggtgccgacgtaccgttgtccggtggcgacggccaatggctggcaggcttcctggccggtcacagcacctccgacctagacctgaaccgtggcagcaaagccaccgtcaacagttactacgccggtggttacgccacctggctggacgctgaaagcggcttctacttcgacggcgtgctcaagttcaaccgcttgcacaatgagtccaacgtggcgatgagcgacggcaggaaagccaagggcaactacacgcaaaacgcagtgactgcttcggcagaggtgggccgccacatcaagctggacgacggcttcttcgtggaaccttacggccagttggccacggcgatcatccagcgccagagctacgagctggataacggcctgcaagccaagggcgcgcgtaccgcttcggtggtgggcaaggccggtgtgaccgccggacgtgacatccagctggacggtggcagtgtattgcagccgtacttgcggactgccgttgcccatgagttcaaccagagcaacaaggtgtcggtgaacggcaatagcttcaacaacgacctgtcgggcactcgggttgaaatggcagctggtctggccatggccgtgtcgaagaactggaaggtccatgccgatgtagagcgcagcatgggcaagagcgttgaccagccgtggggggttaatgtgggggtgcggtatgacttctaagagtgcataaactcacacctaataaaaaagccccgtatctttgatacggggcttttttacggttatggaacgggtcgaatgttcaagagcgttgtggtttagcgacctgcgttattagaaaacgatagcattgatatacgcaccgtcagctgtatgggtttcgtatcccaaaccctcgccactcggtaaaaagacgctgtagtgagagtcgtcatcccttttatgaattgtccaggtatgagtgcttattggaaatgcggaaccgaatcttgaacgtaacgagctgagttgactcattgtgagcaattgcccgctgacattcgcggtcccccattgagtgttaataaaatgccggacagtctggtatgaccccgataccctaattccataggtggctgtctgcatcggttgtgatcggtctgtcacagtgatgatggcggtgcctgcagagttgatattgacctgtcctgttgagctattcactgttactgcactggaactactgcgatagaaataaggcggtgtgccgccagtggcttggcgtgttgacggcagataagcacgctcgttgttgggaaagccggtccctagcagccatcccccaagattaacgtcccttgtgtcgtttggaatggtcaatgcagggaccgaactcagcgtgtaggtcctaggattcaacgctatcgcttcgctctcaaggccagtcccattcaagacaaccttggccctaacagtcagggagctgccattgggttttgtcttgaggtaatcgcctgggatcaggtccagagtacggcccgctgtaaactcgggtgcggtgacaaccaggccgtcacgcaacgtcaggtcgccggctgtgtgttccagttcaatgaataccggttgtcccgccttgaagaatggccatgggtcgattttcacgttgttggcagtgttcacgttaattgaagtgccattcgcctcaggtactgaaacgatgtccagcgtactagatggtaatgccgtgaccctgagcgtcaggatggctgacgaaacagggttgccattgcgcataaccgtgaaaaacacctggcagaaactccccaggtaagcggccacgaaatcactcaggatggggaaagaaatgtaatccacacctgcgtcaggcacaccaggtttggacgggatgacgggttcgcccaggccaggcatacccacaatatgaacagttacatcatcggtgggtaacaagtcggtagcaggcacctggatggtgacgatgatgggcgacggcggccttacatgcagtgggttcagctcggcttcggtaggcgaaatgaccgtcgcctccagcaccttgggtggcgtagggagcttcaacgccatgccgacattgataaccaggtcttgtgaaaacagagtagcggcgcctggtgcgggaatgacttcgtaaaacaacctcattgtactgttcaggttggcgagtacgatcagtcgtgggatggtaaacggcaggactgaatcctcccagttgatgtctacgttgaaccaggtgcttgcaaagctgccgcctggctgactgcctataccgagcaaccgtacctgggctccttcgacaatcaccgggtgggggttgatgcgaacattcaggtttgccaggctgatggcggggtcaaacgtgaggttgggaagtgttgcctgcaatgtccacggcggcggcagtatcgcttgtgcattaccgaccggtacagtgaccgacttcgatgcgggtcgctgggcagcgccattgatctcgtagtacgcaacgaagtagccaccgttcagtgcggcgaagaaggggttgtccaagaggaacgtcagatcgccagtgccggccatgtctgtaaacgtcgcgtacacctgtcttccatcagccgtcaggcccgtcacgatgaggtcaacgcggtcattcggtaactggccgaaataacgcggaaccacaattctcaccgggttggtatcggctggtaaggcaccctcgtcgaggtcccacacgatcggagctttaagaccgtcctcaacgggttcaccatcgatagcgtacaacacaccttctgacgggcgatcagcgacgcctggtcgaacccgtttgtaggtgatcagaatcagtccgcccgatagcagcaagagaaaatccagcgccaagggaatgtacacacggatcggtgtgatcacggtgactggatactcgatgatcttttcggaggtggtgccatctgcggcaagccctctaaccgtaatgatcaccgtatcgccgacgaggtagccttggttacggatcagcagttccagcggcgtatcgactacaagatgtcgcgtgtcgataaagtccagatcgcgtactgggtcgtaatcggattcggatgcaaataacgctttcagcagcggctcggtcgaagcaccggagtccacttgtatcagccgaggcggtgaggccccgggggaggggttgccgaccttgtccagcacattccactcgaccaaacgaacgccgtcgggtaccaggctccaggtaccgaaatagatggtgaatctgatgggggcagtgcctgctgcttcaaaagcagtgaccgtatggctgaccgttactccgccgatgctcaccgtgatgacatcatgttccttgcgccagtgaacttgcggcaatgacctgtccagcgggtagttggcgatttctacctcggtaccgagctgcatctgagcctgagtaacgagaccaaaattttcgatcaacgggtcggtaaacttcaacactgccatgttttcgttgtagggcttgccgaaggtaggaaatgggctgaccggtagttggcgatcaacgaaaatattaaagagcttggacggatcggcgttgccaccaagcggcgttacaaaagcctgtatcgtattgtttgcctggtcgataaaacgactgctattgatgaacaggacaatcggcttgccattggtggcttcatcgtcggtgacggtgtggaacgcaacttgtgtcccgttgaccctgaggctgatgaaatcgagctcggcttggcccaggtatgcatttacgatgcagatcacaccaaattggttgactatcaaggccgcagcattgagcccaccgtcgtggcccggaacagggttccagagtgtggggaggtacaagggcagcacgctgaagggcgtattgataaaagccttgtcattcaagatcgccccggcgggcggtggagacgtgaagccttcacgtcgatacaggttaggtggcagcccacccgacacttggctacggactgtggcgagttggtttcttgctccgctgcgagagctcgcagtcaaggctggaacactggattcgtcatcattactgggttcagggttttggtcgtaggtcatgatcggcatcctgttagatagaatcgacgcgatctgaagcccgatggggcgtcgacagtcgcaggctcgattcaacgcccgcggtcgctggccgactagctgtgaaaaatgacagtgccgacgagtggcactaactagctatagcagcacgagggccactgtttcagagcacatgtttgccacatgctcgttggacgtggcccaaaactgcacgcttatcatgggcatggacttctccacgctctaatgtttgattttgagtcgacctcataactgaatgggccgactgttcgaaatcatttccgtacgaatgcgtacactacaagacagtcaacacaagcagagacgcggagtcggcagaccacgtgccccagtctgtgccctgaccgcctggcataaaaacactgtggtaaacatcgggctgatctttttgtgggtggacagtccaggccagaccatttacagggaatccagggccgaatcttgaaaccagcgagatgaattgatcgattgtgagcaattgcccgctttcattcgcgtccttccagttcatggaaccaaggtactcgagggtctggtgctccccggttacctgaatttcatagctggctgtctgcggcggctgcgactggtctttcaccgtgatgatggcggtgccctcggagttgatattgacttgtcctgtcgaggcattcacctatacggcgctggaattactggagtattcataacgcgggttaccgccagtggcgacgcgtgttgacgggagataagcacgctcgttgttggggaatcctttcgccagcagccaaccgtcaagttcaattacccttgtatcgcctggaatggtcaattctgacaattcctgagcattaccgggtttagcgttttgatcgtcagtcatgatcggcatcctgttagttggatagaatcgacgcgacctgacgcccgatggggcgccgacagtcgcaggctcgattcaacgcccgttggcgttggcccactagctgtgaagtttgacagtgccgacaagcggtaatgaggaggcggagcgtgccatcgcgcaagagttaagacgggcgattccaatgcctgaacaacggctccgccagaaacaacacaaacaacaagcgcatcacctgcatcgccgtcaccagtggcaccgacagttgcagggtctcggcggtcaggctcatctcggcaatgccaccgggcatcatgcccagggtcaatgagcgcaggtccaggtgtgtcaacgcactcagccccacggccgccaacgtcgccagcgccatggtcaacgcggtgccgatcaaggtacggcccatgaacgacggcgcccgacgaaagaactgccggttgaagtggcaacccaggccactgccgatcaaccactggccaatctggctgccgccatcgggcaggccgatatgcaaatcccacacgacgctggccgtggcactcaccagcaacggcccgaataaccaagggttcggctggcgcaagcgctgccaaccccaggcgaccaaggcgcccagcggaaacagcgccagcagccacggccagctcaccggcgccgggtgaaactgcggtgtaccaccttcgagcaagtacttgaagatcgccggcacacacaacaccaccatcagcacccgcaggctctggcccgccgcgacacggctcaacaccgcgccattgcgtgcgccgaggttgaccatctcaccggaaccacccggcatgctcgaaaaaaacgccgtggcgcggtcttcaccgctacggcgcatcaaccacacacccaccacgctcgacaggctggtgaccagtgcgccgaagaagatcagcccgaagtgactcatcacctgttcgatcaccaccggggtgaagtgcaggccgatgccgatgcccaccacccattggccgcatttgcgcccaccgggaatctccgccaactgccacggcgtaaggcaacgcaccaggatgatcgccagcagcgagccgaccatgtacggcaacggccagccgaccaggctggccaggaaaccgccggccaggccgaccagcggtgtgccccaccaatgtttaaaggtgacctcagacatcggccacggcacgacgctgcagggcacgtttacggtagatacgcagcagtggcacaaacagcatgatcgcggtcagtacccacacgccaaaggtgatcgggctcgaccacaggatctccagcgcaccgttggagatcgacagcgcacggcgcaggttctgttccatcaggccgccaaggataaagcccagcagcaccggcgacagcgggaagtcgagcttgcgcaggatgtagccgaagatgccgatacccaccatcaggaacaggtcgaaggtggtggcgtgcaccgcgtacaccccgatggcggtgatgatcgcgatcaccggcaccagcgcccagttcggcacggcgaggatacgcgtgaagatgcggatcatcgggatgttgaggatcaccagcatgatgttggcgatgaacaacgaggcgataaggccccagacaatgtccggttgctgttggaacagcagcgggcctggggtgatgttgtacagcgacagtgcgccgatcatcaccgccgtggtgcccgagccgggaacgccgagggtcagcatcggcaccagcgcaccgcaggcggacgcgccaatcgctgtttccggagcggcaaggccgcgcatgtcgccctggccgaatttaccgctggcaccggccaggcgtttttcggtcatgtaggcaacggccgacgccaacgtggcacctgcaccgggcagtacgcccatgatgaaaccgagcaggccgcaacggatattcaccacgaacaccgcgcccgcttccttcaggttgaacatcatgcgcccggtggctttgaccgcttcctggccacggtgggttttttccagcagcaacaaaatctcgctgatggagaacagacccagcaccagcaccacgaactggatgccgtcggtaaggtggatgttgtcgccggtgaagcgatacacaccgctgttggcgtcgatcccaaccgccgacaggaacaggccgatcagcgccgctacaaatgtcttcagcggtttgtccccggccatgccgccgaggcagacaatcgcgaacaccatcagtacgaaatattccgccgggccgaaggcaatcgcccatttggccagcagcggcgcaaacagcaccatgccgcaggtggcgatgaacgcgccgatgaacgaactccatgccgacaaagacagcgccacgcccgccaggcctttgcgggccatcgggtagccgtcgagggtggtcatcacggtggaggcttcgcccgggatgttcagcaggatcgagctgatgcgcccgccgtattcgcagcccaggtacacggctgccagcaggatcagcgccgattccggcggcaggcccagggcgaaggcaatggggatcaacagcgccacgccgttgatcgggcccaggcccggcaacaggccgaccacggtgccgatcaaggtgccgcacagcgcggtcaccaggttgtaaggggacagtgcaacgccgaaaccctggcccaagtagccgaaagtatccatatcagttctccagaacgtcgagcaggccgaggggcagcggcacatccatggctttatcgaacaacaggtaaagaccaatcgccatcaggctgacgatcaccacgctgggcaaccagcggccgccatacaggcgcgccatcgggatgccgatcagcatgctgctgaggatgaaacccaggggttcgaaggtgccggcgaacacgatcaacagcgcgacgcacacgccgatcttgatcagggtttcgcggtccagcgcgggttcttcttcggtgtgtttggtcggttgtggacgaaacagcatgtagatcagtgccaggctcatcagcccgagcatcagcagcgggtaggcgcgcggccctaccggctcgtaggaaaacgacgcctgatacggccaggccatcagcgcgaggccggcacaggccagcagcagcgcggcggcgaaaatgcgttgtaagagcatgtggaactcctgggccacgccgcttggctaaagggcgtggccacacaaaagaggggcgattactggatcaggccgaactctttggccagcactttgtagtcagccacttgtttcttcacgtaggtgtccagctccgggccggtcatggcgaacgggaacagctcacgctggtcacgcagcttggcgaactcctcggaggccagcagtttgtcgaaggcgtctttccaccaggcgtagtcggcatcgctgacttttggcccgaggtagaagccacgcaccactggccagacgatgtcgtagccttgctctttggcggttgggatgttcttcatttccggctcgtccagacgctgttcggagaacaccgccagcaggcgcatgtcgccgctcaggatgtgcggcatggagtcggagatgtcggtactgcccacctggatatggccgccgagcagggcggtggcgatttcaccgccgccttcaagggcgacataacgcagttcgcgcgggttgatcccggcggccttggcaatgagcgcggtttgcatccagtcctggctgccgacggtgccgccggaaccgatcaccacgctgcccggatctttcttcaaggctttgaccagatcgtcgagggtcttgtagggcgaatcggctttcaccgcgatggcaccgtagctggtgccgaccgctgccaaccagcgcacggcgctttcatcgaagcgaccgaacttgccttgggccaggttcaacagcgaaccgctggaccaggccaccagcgtgccgccgtccgcagggcgctgtgcaaccacggcgttgtaagccaccgcgcccacgccgccgggcatgtaggtcacgcgcatcggcttgctcaacagcttctcgttgaccagcgcgctttgcgccagtttgcaggtcaggtcaaaaccaccgcccggcgaggccggggcgatgcactccgggcgcttgggttcgtcagcggccagcagttggccggcgaacagcatgcagccggcggcgagggccagtttacgcagtgaaagggtcatggttatctccgtctttgttgttatgaggggttactaccagagcgcaacgctgtagctgaccagcagacgcacttcatctgcgtcacgggccgagtagttggagcggtacgtggcgttgcgcaggcgcacggccacatccttgaacgtgccggcttgcaccacatacttgatctcggtgttgcgctcccactccttgccggtctcgccgttcttgagcttgatgttgtcacccgacaggtaacggctcatgaagctcaggccgggaatgcccagcttggcgaagtcgtagtcgtagcgcgcctgccaggaacgctcttcggcgccggcaaagtcgttgatctgcacgaagttgaccaggtacgggtcgctgccatccacataggggaaggcgctgtcgccggacatgtgctggtaaccggcgctgagcttgtggccgttgagggcatagctgaacaggccgttgagggaggtgttgtcgatcttgccgccacgggcggcgccggtgtcatcgctgatggccaggcgcaggtcggtgccaaacgtgccaggacccatcgggcgcgaggcgaccaggccgaggaagtgctggcggtacacgtcgtcgagttgggcgaagtggtagctgccggtgatcttgtcagcgaacttgtagtcggccccgccgaaattgaagtgtttgccggtggcgccgctgacgaagcggctgttcttgttgttgagggcgatgtcttcgtaattggtgtcgtcgcggtccttggctttgtccaggcgcccgccggtgaacaccaggttcttgaattccttggaggtgatcaggccaccgttgaaggtctgcggcaggatacgcccgtcattgggcttgaggatcggcagctcggggatcaacgagccgatcttcagctcggtggccgagatcttcactttgccggtcaggcccagcttggagtattcgttggcggcgcggccatcatcatgggtaggcaacaggccggtgccggtgcggtcggggctggagtcgagcttgaccccgagcatgcccagcgcatccacgccgaagccgacggtgccgtcggtgtagcccgattgcaggttgagcatgaagccctgggcccattcgtcgcgcttggattgctgggcgctggtgccgtcgcggaagtcgcggttgaagtacatgttgcgggtttccagggtcgcgctactgtcttcgaagaaggccgcctggctaagcggcgaaaagccggcaagggtagcagcactggcgagggcggtctgggtcaggcgagaaaaacgaacaggcgaggggacctggggctgtgtcgacagcatcgttgtgtactccgttattgttcttattttggcgaaaacgcgtcgaggcgtttttcgggcgctgcggttaaggcagctcggcgggcatagaccaccgtggctggatgctaaagggcgaagctttcactaacctttcagtcggctttcaatgttttcgggcttcacaggccggtcggcgcctgtaaactgcccgccaaagcgtggcgccgaccacccctgaatgaggtagtaatccatgcgtgtcttgctggttgaagaccatctgcaactcgccgaaagtgtcgcgcaagcgctcaagagcacgggtttgaccgttgacgtgctgcacgacggcgtggcggcggacctggccctgagcagcgaggagtacgcggcggcgatcctcgatgtggggctgccgcgcatggacggtttcgaggtgcttgcgcggttacgcgcccgtggcaaaaacctgccggtgctgatgttgaccgcgcgcagcgatgtgaaagaccgcgtgcacggcctcaacctgggggcggacgactacctcgccaaaccgttcgaactgacggagttggaggcgcgggtcaaggcgctgctgcgccgcagcgtgttgggtggtgagcgtcagcaggcctgcggcgtgctggtgtacgacctcgatacgcgacgcttcacggtcgggggagagttgatgacgctcacctcccgcgagcaagccgtgcttgaggcgctgattgcccgtccgggtcgggtgatgagcaaggagcaactggcttcccaggtgttcggcctggacgaagaggccagccccgacgccatcgaaatctacgtgcaccgcttgcgcaagaaactcgatggccagcccatcgccatcgtcaccttccgcggcctcggctatttgctggaagcccgcgatgcataagcccagcagcctacgctggcgcctgttgtggaacctggcgctgttgctggtgctgttgatgctggccagtggcatgagcgcctactggaacggtcgcgaggccgccgacaccgcctacgaccgcacgctgctggcctcggcgcgtaccatcgccgccggcttgacccaggtggacggcaccctgagcgccaacgtgccctacgtggccctggacacctttgcctacgacagtgccgggcgcatttactaccaggtcaatgacatcgaccagaaactgatctccggctacgaaaaccttcccggcccaccgccgggtacgccacgcaccgatgactatccggcactggcacgcttttacgacgccatctaccagggccagcaggtgcgggtggtgagtctgctcaaggcggtgtccgaaccgaacatgaacggcatggccgaaatccgtgtcgccgaaaccgatgaagcacgcgtgagcatggctcgcagcctgatggccgacaccttgctgcgcctgggcatgctcgccgtgggcgcgttgttgctggtgtggttcgccgtgagcgcggcgttgcgcccactggagcgtttgcgtacggcagtggaagaacgccagcctgacgacctgcggcccttgccgttggtggaagtgcagcatgagttcggcccattggtgcgttccctcaaccatttcaccgaacgcctgcgcggccagttcgagcgccaggcgcagtttattgccgatgcggcccatgagttgcgtacgccactggccgcgctcaaggcccgactggaactgggcctgcgcgccgaggaccccgccacctggcgcagcaccctcgaaaccgcagcccagggcactgaccgcctgacccacctggccaatcaactgttgtccctggcacgcatcgaaaatggtgcccgcgccattgccgaaggcggcgcgcagttgctcgacctcagccagttggcccgtgagctgggcatggccatggcaccgctggcccacgcacgcggcgtggcattggcgctggaagccgatgagccggtgtggctgcgcggggagccaaccctgttgaacgagttgttgagcaacctggtggacaacgccctggcgcacacgccaccgggtggcaatgtgattctgcgggtcacggcgccggcggtactggaagtggaagacgatgggccgggcatcccgctggatgagcgggaccgggtgttcgagcgtttctaccggcgtagccagcagggtatgggctccggcctggggctggcgatcgtcggcgaaatctgccgggcgcacctggcacagatcagcctgcacgatggcgagcaggccgggctgaaagtgcgggtgagttttatcgcgggttgatcagtagaacatcgagcgggcttcatccagctcggtgcgcaaggcgtcgctgtaagggtcgacccgcagtttctgcatggccggcaagctggaaaccgggacgctggccaaggggtgatcggtgccgcgatggcaatacagcacggcgacctgcaccaggtcgatgtagtcgaggcgcgctgaatcgcgttccaggtccaggtattggccaggcagtttcgccagcatttccggaaagtcccagccgcccagcagtttgtcgcccagcagtgggtggatgctctcgatgacgtggttgaggctgaccgggtcggcgagcagctcgtagtggtcttcggcgtaggtcaggatcggcagcacaccgatctggtgcaccaggccgccgagggccgcctggtccggcttgagttgtgtgtggctgcggcacagggcataactcacacccgcgacctccaggctgcggcgccacacatcacgcatcttttgttcgaccacgtcggaacgcgcgtggaagatctgctccatgaccaggccgatcgccaggttgctgctgtagttggtgcctaatcgggtgatggcggtgtgcaggtcggtgacttcctgggtcgcacgcaacaacgggctgttgaccactttgatcaggcgcgccgacagcgcggtgtcgcgaccgatcactttgctcaagtggctgatgctgatctccgggtcttctgcggcctgacgaatattcagggccacttccggcaatgtcggcagaaccaggtcatcgttatcgatggccctcaccaaagcctgttggactttttccgccagcttgttcattcatgctctctagggtgttgcaagaaggtacggcgattaacgctggatctctcgatcgcggtcgagggtgtaaggcaggtcgagcagtcgcaagcctggaccttccagtgtgcccagatgcacatcgccactctcggcagcttcggcttgcaacacggccagaagttcaacgctctggtcagcttttgcggcgatcaccacttcgccgatcgagctgttatggctgggagaaaacagctgagtgcctggctcgggcatttccggcgcattgaggctcaaacggtacaggcgacgtttgagtttgcccaggtactgcatgcgcgcgacgatttcctggccggtgtaacagcctttcttgaagctcacgccgcccacggcctgcaggttgagcatctgcgggatgaacagctcgcgggtctggggcatgacctggccgatgccagcgcggatttgacccagcagccattcattcaggtcggtttctttgagattcgcagccaattgagggcgtataacgttggcgtgctcggcaggcacccaaagttcagcgcgatcaggggagacgcggatggcaatcaacgtatcgctgcgggcgacgctgtcggtctctgccgacagctcaaggccaaggcttatgagggcttgatccccattgaccaggccaaagcgcacccaggcggcgctttcatcggtgagtttggacttggagaacacggcgtatttcttcaggtcggccagttgcggctccagcagctcgctggccatggccagcaacacaccgtcaccttgcagcaggatgcggaagctcgactgcatgcgccctttttgcgtgcagcgcgcgccgaggctggcctgggtgtcgctcaggtaattgaggttgcaggtcagttggccctgaaggaatttggcagcgtcggcgccgcggacggcgagaacgccttcgtgggacagggggcagaagaaagcagagtcagccatgggtcatcgcaggtcaaaaagtcatgggtgcatcatagaggggcgcccggcaaatggatagtttccgtatggggcgaccaaagccgactgttccggtgccgtcgggtctgtatacttgccgcctatttgaggagcgctccatggtcgaagatgtagaaatcaatcgcctctactggcacagccgtcgcggtatgctggagttggatgtgttgctggtgcctttcaccaaggaggtctacgcgacgctcaatcaagtggatcgcgacctctatgtccgcctgctgacgtgcgaagaccaggacatgttcggctggttcatggaacgcgccgagtcggaagacccggagctgcagcgcatggtccggatgatcctggatcgtgtccagcccaagtaatagctttgaatgccgctggcaggcctcacggctgttgctggcggcctatctccttgcccagctgtttgcgctgggcgccttgatgttcgtgcaacttcctttttcgagccttggcatgctggtgtgcctggcgcacgccgcctgggttttgccacgcgctgtcctgttgactcaccgttcgtcgattggtggcctgcgccgcgatgcagacggctggcagctgtggagtgccgcgcggggctggcacagcgtgcagttgcgtcgcgatagcctggcgttgccgttgatcgtggtgctgcgttatcgggtgcagggcgaacggcgggtacgttcggtctgtgtgccgagggattcgcaggccgccgatgtgcaccggcgcctgcgtgtacgcctgaagttcagccgccgtaggtggttggcaccaggatagtgtcgcgggcctcgggcagcatctgcggatagtcgagggtgtaatgcaggcctcggctctccttgcgctccatggccgagcggatcatcaattcggcgacctgggccaggttgcgcagctcgatgaggtcgcggctgactttgtagttgctgtagaactcgtcgatctcgtccagcagcagccttacgcgatgttgcgcgcgttgcaggcgcttgttggtgcgcacgatccccacgtagtcccacatgaagcggcgcagctcgtcccagttatgcgcgatgatcacgtcttcgtccgagtcggtcacctggctggcatcccagcggggcagggcggttggcaccggaatacggggcaattgttcgagtatgtccgccgccgcagagcgtgcgtagacgaagcattcgagcagcgagttactggccatgcggttggcgccgtgcaggccggtgaagctggtttcgccaatcgcgtacagacccggtacgtcggtgcgaccgtgctggtcgaccatcacgccgccgcaggtgtagtgcgcagccggcaccactgggatcgggcctttggtgatgtcgatgttgaaggccaggcagcgctcatagacggtggggaagtgggtcttgatgaaggcttcgggtttgtggctgatgtcgagatacacacagtcgatacccaggcgcttcatctcatggtcgatggcgcgggcgacgatatcgcgcggggccagttcggcgcgagggtcgaagcgctgcatgaagcgttcgccgttgggcagtttcaggtgtgcgccttcgccacgcagggcttcggtgatcaggaagctcttggcctgtgggtggtacaggcaggtggggtggaactggttgaattccaggttggccacccggcagcccgaacgccaggccatggcgatgccgtcaccgcaggcgccgtcggggttactggtatagaggtagaccttggccgcgccgccagaggcgaggatggtgaagcgtgcgccgtaggtgtcgacttcgccgctgccccggttgagcacgtaggcgccgaggcagcgctcgccgtccaggcccaggcgtttttcggtgatcaggtcgacggcgacgcgttgctccagcaattcgatgttggggcgttggcgggcctggtcgaggagtgtcctgaaaatagccgcgccggtggcatcggcggcatggatgatgcggcggtgactgtggccgccctcgcgggtcaggtggaactcgaaaccaccgtcgtcgctgcctgcgtgttcatcgcgggtaaaggggacgccctggtctatcagccattggatggcctcgcggctgtgctcgacggtgaaacgcaccgcttcttcattgcacaggccgccgccggcgttgagggtgtcttcgacgtgggattgcacggtgtcggtgtcgtccagcaccgcggcgacaccgccctgggcccagaatgtcgagccgttggccaggtcgcctttgctcagtaccgcaatgcgcaggtggctggggagggtcagcgctaggctcaaaccggccgcgccgctgccgatcaccaagacatcgtgttgaaactgttggctcattggaaggattccgcaaaaagcgatccgaagaggtggcgcaaacaggacgcctggatcggcgaatcaaaggggcacacgggctactagtatatagaggggtggagcggcacaatagccgggcattcgtggcaatgtgagattacggtgcacggctcgggtagaatcagctggttattgaagcgggaactttttgcataggccccgactcaatagcaggttgcccgaaagctgggaaaacgttgagtttattggcccgtcgggagcattggacgcgtcagaaaaccgacgacaagattattcgcgcagtcggcgttgcccgtgctgcgtttttcgtgtgtgccaaatcagtgcgtgccggaaacttgcttgaagggggagaacttttgcgaaaagaccgagtctatgtttgcaagcctgatcgtttagttatgcaagcctccttcaagtactacgaggagtgttcatgctaacccaggaagaggatcagcagctggtcgagcgcgtccaacgcggcgacaagcgagcttttgatctgctagtgctgaaataccagcacaaaattctcgggttgatcgtgcggtttgtgcacgacacccatgaagcgcaggacgttgcacaggaagcctttatcaaggcttaccgtgcacttggtaactttcgcggtgatagtgcgttttacacgtggctataccgaatcgccatcaacacggcgaagaactatctggtgtctcgcggacgccgcccgccagatagcgatgtaagttcagaagatgcggaattttacgatggtgatcacggcctcaaggatctcgagtcgccggagcgtgcattgctgcgcgacgagatcgaaggcaccgttcatcgcacaattcagcaactgccagaagatttgcgtacggcgttaactttacgtgaattcgatggtctgagttacgaagacattgcgagcgtcatgcagtgtccggtggggactgtaaggtcacggattttccgggcccgggaagccatcgataaagccttgcaaccgttgttgcaagagaactaaagacagcggcgacagccaagagaggaaccgccatgagtcgtgatgccctgcaggaatcgctgtccgcagtgatggataacgaagcggatgaactggaacttcgtcgagtgctcaacgcatttgatgatgccgaaacccgtgatacctggtctcgttaccaagtcgctcgggcggtgatgcacaaggatcttctaatccctcgtctggatattgctgcggccgtttctgctgcgctggctgatgaagccgttccggcaaaagctgctcgtggtccatggcgtagcctgggtcgcttggcagttgctgcctcggtaactgttgccgtgcttgctggtgttcgcctgtacaaccaggatgaaatcgccggtgccgaactggcccaacagactcagcaaccggtcatggccggtccgcaagtcaaaggcccagcggtattggccggctacaaggaaagctctgacaccaccggcccgatggccaacggtgtactgcaagggcaatccggctggcaagaccagcgtcttccaggctacctgcgccagcacgcacaggaatcggctctgaagggcactgaaagcgctctgccttatgctcgtgcagcaagcctggaaaaccgctaatctgtaaggagctctatgcgagccataccgctccttacgcttttgctcagtggttggtttgcactccccgcccacgccgatgaagcccaagactggctgactcgacttgggcgtgcagagcaacagcaaagctttcaaggtacgttcgtttatgaacgtaacggcagtttttccacccatgacatctggcatcgtgtccaggacggtcaggtccgtgagcggctcttgcagctcgatggttctgcccaggaagtcgtgcggttggatggccggacacagtgcgtcagcggcaccctcgtcgcaggcattggcaattcccgtgatgcaccgtcacgtgcgctcgatccgcaaaaactcaatcaattctacgaactggccgtcattggcaaatcgcgcgtggccggtcgaaatgcggtcatcgtatcgatcacgccgcgtgaccagtaccgttatggttttgaactgcatctggatagggagaccgcgctgccgctcaagtccctgctgctgaatgatcaagggcaattgctggagcgcttccagttcacgcgattgaatacttcggtcgtgcctgatgaccgggatctgcaacccagcagcgactgtacacctatcgccgtcgcaaatagcaaggcgccagaggtgcaatctaccgagacttggcatctggaatggttgccgccgggttttcagctgaccaacaccagtgcccgcaaagacactcagaccaaagcgaccgtcgacagcctgatgtatgaagacgggttggcgcggttctcggtattcctggagccgatcagcgatgcaagcgtcacggagacccgcactcagctgggccctacagtggcggtatcgcgtcggctgaacacggtggacggtgaaatgatggtgacggtggtaggtgaaatacccatcggcaccgcagagcgtatcgcgctatcggtgcgtggtgaaaaaaaaccagccgtccagccgtgagtctttaatcctatgttcatcctgacgtttcactgtacttccatgccaggttggctgccgagagcatgaaatgtctggatcagcattttcacttgcaaaaatccctcatgttttttataggtcagggcttgtcggctctggccttgttttgttcgcggaacaaagatgtcggtcgcggtttccggcgtttcttgaaccctgtcgctcaaccctgctcgtcgtaacgggagctgtatgtcgataccacgtttgaagtcttacctatccataatcgccacggtgttggtgctgggtcaggcgttgcctgcgcaagcagtcgagctgcctgacttcacccaattggtcgagcaagcctcacctgccgtggtgaacatcagtaccacgcaaaaactgccggatcgcaaagtctccaaccagcagatgccggacctggaaggcctgccgccgatgctgcgcgagttctttgagcgtggcatgccgcaacagcgcgcaccccgtggtggtggtggtcagcgcgaggcccagtccctgggctcgggcttcattatttcgccggacggctacatccttaccaacaaccacgtgattgccgacgctgacgagattctcgtgcgcctggctgatcgcagtgagctgaaagccaagctcgtcggtaccgacccacgctccgatgtggccctgctgaagatcgacggcaaggacctgcccgtgctgaaactgggcaaatcccaggacctgaaagccgggcagtgggtagtcgccatcggttcgccgtttggttttgaccataccgttacccaaggcatcgtcagcgccattggccgcagcctgccgaacgaaaactacgtgccgttcatccagactgacgtgccgatcaacccgggtaactccggtggtccgctgttcaacctggcgggcgaagtggtcggcatcaactcgcagatctacacccgctccggtggcttcatgggggtgtcgttcgcgatcccgatcgacgtggccatggacgtctccaaccagctgaaaagcggtggcaaggtcagccgtggttggttgggcgtggtaattcaggaagtgaacaaagacttggctgaatccttcggcctcgacaagccggccggtgcactggttgcgcaaatccaggacgacggcccggctgccaaaggcggcctgcaggttggcgacgtgatcctgagcatgaacggccagccgatcgtcatgtcggccgacctgccgcacctcgtaggtgcgctcaaggcgggtagcaaagccaagctggaagtgatccgcgaaggcaagcgccagactgttgagctgactgtgggtgcaatcccggaagaaggcgcgaccctggacgccctcggtaacaccaagccgggtgccgaacgcagcagcaaccgtctgggcatcgctgtagccgagctgaccgatgagcagaagaagagcttcgaccttaagagcggtgtggtgatcaaggaggtgcaggacggccctgcttccctgatcggcctgcagccgggtgacgtgatcacccacctgaacaaccaggcaatcgatagcaccaagcaattcaccgatatcgccaaggcgttgccgaagaatcgttcagtctcgatgcgcgttctgcgtcaagggcgtgcgagcttcattaccttcaagctggctgaataagtcggtaaaaacaaaaagccccgctttcgtttaacgaaggcggggcttttttgtgcctgacgggtttagctcatcatccctttgaccaggcgttcctgttcgatcaactcacgctggcgtgcatcgatgcgcgacgacagcgggaaattgctgccggcgcgacgcttggcaaaatccaattgctggatagcctgctggaaatcacccaccagcgcaaagtactcggcgcgagcctgatgcagcccgatgatgttgcccgacaagccgcgcgtctcagcgacctggtaccacacgtccgggtcatccgggcgagacttgagcaaaccgtccagcgccttttccgcatcggcggtacggttctgcttgagcagcaggtccacgcgcacctgattcaacggatagttacccggatactgggtgagcatccgatccgtgcgttgctgggcatccggcagtcggttgttgtcgatgtccagctggatctgcgccaggttgtaggtgatgtcgctgggcgctttggccagcagcggtgcaaggttttcccgagcctgcttgaactgggaacctttgatctgggcgatagccaggccgtagcgcgccacatcgttcttcggattttcgtccagttgcgcctggaagcgcttggcggcgaggccaggggtgtcttcgtattgcagttgcacccgtgcacggatgagctgataacgcaggctgtcttccttgccgccaggcttggattgctcggcgcggttacgggtgtcggcgatccgcgattcggtgaccgggtgcgtcaacaggaactccggcggtttggcatcgaagcggtattggcgcatcaggcgttcgaacatggtcggcatggagcgcgggtcataaccggccttttccaggttgaggatgccgatacggtcagcctcttgttcgttctggcgagagaatcgacgttgttcttggatcgccgcggcctgggtgccggcaatcgcggcaatacctgcatcgcctgcacccgccgccgcagcaatgatgccgccgagcagggcggccatcatcggaatctgcatgcgctgttgcgcttcaacgccacgggcgaagtggcgttgggacaaatgcgccagttcgtgagccagtaccgaggcatattccccttcggtctgggcgttgaggaacaggccgccgttgaccccgacgatgccacccggtgcggcaaaggcgttcagttgcgggctgttgatcaggatgaattccagccgccggtcattgacctggctggtctccaccagcttgtacacgctggtttcgacgtagtccttgagctgcgggtcgttgagttgcgagacctggccccgtaggtaggccagccaggcgcggcccaactggtattcctgttgcggcgagacaatggcagaactggcgtcgccaagtgacggcaggtcgtcagcgaagcctggggaggccagcaggcaagccagcgtcagcagggtggggcgcaaaaaagtcatgcacagagcctttcgacaaagagcttactgtagccggacactgagcttcggaccagatattctaagcactcccgacgcttgcccggagtaaaccatgaccaacgctgtagcctttgatgccgaactcgatgccagcggcctcaattgcccgctgcctttgctcaaggccaagctggaactcaaccgtctggccagtggcgcagtgctcaaggtgatcgccacggacgctggctcccagcgtgatttccgtacgtttgccaagttggccggccacacgctgttgcacgaagaagacgccgccggtgtttaccgttactggttgcgcaaggcctgaaccgtttgccccatcacccgaggttgattgatgttcaaagtgttacgagactggatccagcgctacttctccgatgaagaagccgtggtgctggcggtcctgctgtttctggcctttacggccgtactcaccttgggcggcatgctggcgccggtattggcggggatggtgctggcttacctgatgcagggcctggtcactacgctggagcgcctgcgcctgccgggtggtgcggcagtagggctggtgttcgccttgttcatgagcttgttggtgctgtttatcgtggtggtattgccgctgttatggcatcagttgatcaccctgttcaatgaactgcctggcatgctcgccaagtggcagtcgctgttgctgttgttgccggagcgctacccgcatttggtgtcggacgaacaggtgctgcaagccatcgaagtggcgcgcggagagatcggaaaattcgggcaatgggcgctgaccttttccctgtccagcctgccgctgctggtcaacatcatgatctacctggtgctggtgccgatcctggtgttcttcttcctcaaggaccgcgccatgatcggtcgctgggtgcgaggctacctccctcgtgagcgcgcgttgattacccgggtggcggaggaaatgaaccggcagatcgccaactacattcgcggcaaggtcatcgagatcattatctgcggtggcgtgacctacatcgccttcatcgccctggacttgaactacgcggccttgttggccttgctggtggggatttcggtggtggtgccctacgtcggcgccgtggtggtgaccgtacctgtgaccttgatcgccttgttccagtggggctggagcgaccagttcatctacctgatggcggtttacgggatcatccagaccctggatggcaacgtgctggtgccgctgttgttctcggaggccgtcaacctgcacccggtcgcgatcatctgcgctgtgctgttgttcggtgggttatggggattctggggcgtgttctttgcgatcccactggcgacgttgttcaaggcggtgctggatgcgtggccgcgccaggagccggtggttgcgccgatgttgtaacaaatggggcgaacaggggtgttcgccccaaggcttcaagccttgtttaaagcctgcgccgccgccagcacggcatccacatgccctggcactttcacgccacgccattcctggcgcagcacaccatccttgtcgatcaggaaggtgctgcgatccacacccaggtattccttgccgtacagcttcttcaacttgatcacatcaaacagctggcaaaccgcttcatccttgtcactgatcagctcgaaggggaacgcctgcttgcccttgaagttctcgtgggatttcacgctgtcacgcgatacgccaaacacctcggtgttggccgccttgaacgctgcgtactggtcacgaaagccctggccttcagtggtgcagcccggcgtgctgtccttcgggtagaagtagatcaccacttgcctgccctttagggcggcgaggctgaaggtctggccgctggtggcctgggcttcgaaatcggctacgggtttgtcgatgactaccgccatgaaaacttccttacattgggttctgtgggcgccatggctcgatcaaggcgtcgaggttcagggcatcggcgaaatccaggaactggtcgcgcaaccagctgatctgcacgccagccggcaacgttacggtaaacgtagcgttaagcatggtgccgccggtttgcggggcctggtaggtgtcgcaggtcaggttttccagctcgacgttgtggtcgatgaagaactggcacagctcgttgacgatgtccgagcgataggcggagctgacgtaagccacatacggcagggcctgggggcgattctccagggcagcgctgcgcaccacgttgacggtgaagtcatgcttcttggccaggcccggcaggccggtttccaggcgcgccagggcatcccaggtgccggagatctgcaggaccagcgcgctgcactcgccgtggcgggtcaggcgggaggtcacgacggcgcagcggttttcatggctggcgcggcacaggacgttggtcagctccatggggttggcgccgagggcactgataacaaggaattgttcgcgaactgtgggggtggacatgcagccttcctaaaacgatgagcggtcgataccgtgtgggctgtatcgatcaaaggatgaagggtagcgaaaaccgtcgccaagggataggagggggcgttttcattgcgtgaccggtctgatttcatcgtgcttcagggcgtgcttctgcccaatgatggcattgcctgtcgtttagttgcgccagaacgcatcctcaggcggtacttcgcttgtgcaagcatcttggcgccagtaccattacggctctctttttccggcaggagcggttgcatgattgcgggcagtatggtggcactggtcacacccatggatgcacaaggtcatctcgactgggacagcctgggcaaactggtggacttccacctgcaagaaggcaccaacgccatcgtggcggtcggcaccaccggtgaatcggccaccctcgatgtggaagaacacatccaggtcatcgagttcgtggtcaagcgtgttgcgggccgtattgccgtgatcgccggtacgggcgccaactcgacgcgtgaagccatcgagttgaccaaaaacgccaagaaggccggcgccgacgcctgcctgctggttaccccgtactacaacaagccgacccaggaaggcctgtaccagcatttccgcgccattgccgaagcggtcgacatcccgcagatcctctataacgtaccgggtcgcaccgcgtgcgacatgaaggccgagaccgtgatccgcctgtccaccgtatcgaacatcatcggtatcaaggaagccaccggcgacctgcagcgcgccaaggacatcctggccggcgtgagcagcgatttcctggtgtattccggtgacgacgccaccgctgtcgagctgatcctgctgggcggcaagggcaacatctccgtgaccgccaacgtggccccgcgtgccatgagcgaaatgtgcgccgccgccatcgccggcgacgccgtgaccgcccgcgcgatccacgagaagctgatgccgctcaacaagacgctgtttatcgaatccaaccctattcccgtgaagtgggcgctgactgaaatgggcatgatgccggacggtatccgtctgccgctcacccgtctcagcgaagcctgtcacgaaccgctgcgacaggccttgcgccagtccggcgtcctggtttaattgaggaagcactacgcatgaagcgattggccggactttccgcacttgccttgattatctccagcaccagtggctgcggttggatctggggcccggaaggctacttccgtgaccgcggcagcgattacctggaagcacaacctaccaaaccgatggaattgccgccgggcgtcaacgtcgccaagcgccttgacccattgttgccgatcccacgcaacgtcgccgacgacaccaccaaaggtgagtacgtggtgccgcgtccacagccgatctcggccgtggcggatgccagcgactacagcctgcagaagagcggcgactcccgctggatcgtggctcagcgcccacctgccgaagtctggccagtggccgtgcagttcttccaggacaacggtttccgtatcgacgagcagcgtccgcagaccggtgaattcaccacggcatggcagcagggcagcgaactgtccgccaccatggccaagcgcctgcaggccggtggtgtagccgccgacagcgaagcccgtgtgcgtgtgcgcatcgagccaggcgtgcagcgtaataccagtgaagtctacgtggtcagcgccgagcgcccggccggcagcaccgccaacgttgacttcactaaccgctcggtcaacaccggtgtcgactcggcgctggtcgacgagatgctggccagcatgagccgtatctccgagaagggtggctcggtttccctgctcgccgcccgtgattacgacaccccgagccgcgtcagcctcactgaggacggcagcggcaacgtggtgctgaacctgggtgaggaccttgatcgtgcctgggccagtgttggccgcgcgttggagcagggcccttggcgcgttgaagacatcaaccgcagcctgggcctgtactacatcaacgtggcggaaaaggccgagcgtaaagacgacgagcctggtttcttcggcaaactgttcggcagcaagccgaccaaggaagagatcgagacccgcgccgagcgttaccaggttcgtttgagcaaggtgggcgacagcgtgcaggtcaccgtcgagaagaacatcaataccgttgcgccagctgaaacagcacgcaaagtgttgggcgtgattcaggacaacctgggctgatccgatgcgttttgccgttctcggcagcggtagccaagggaacggcacgctggtcgcacatgacgacacgtatgtgctggtggattgtggtttctcgttaaaagaaaccgagcggcgcctgctgcgcctgggggttcaccccgcgcagctgagcgcgattctggtgacccacgaacatgccgaccacgtgcatggcgtgggtttgctgtctcggcgctacaatctcccggtgtacctcagtcgcggcaccttgcgcgggatgcgcaaacctattgaacccgcaggtttcctggccggtggcgagcagttgcaaatcggcgccttgagcatcgatgtgattgccgtggcgcatgacgcccaggagccgacgcagtatgtcttcagtgacggtgagcggcgctttggcgtgctgaccgacctgggctcctactgcaccaaggtgctggacggttaccggaacctcgatgccttgatgatcgagtccaaccactgccgagacctgctggctcgtggtcattacccctacttcctcaagcagcgggtgggcggcgaactgggacatttgaacaaccaccaggcggcgtacctggtgtatgagttgggctggcaagacttgcaacacctggtcctggcccacctgagcagcaagaacaacctgccgcagctggcccggcaatgttttgtcgacaccctcgggtgcgacccggactggctgcaactggccgatcaagattcagggctcgactggcgacacatcgcctagcccaccatttagcaagcggagcccatcatggaaaaacgtgaagaactctaccgcggcaaagccaagtcggtgtacaagaccgacgacgccaaccgcctgatcctgctgtttcgcaacgacacctcggcgttcgacggcaagcgcatcgaacaacttgatcgcaagggcatggtgaacaacaagttcaacgccttcatcatgcagaagctcgaagcggccggcatcccgacccaattcgacaaactgctcggcgacaacgagtgcctggtcaagaagctcgacatgatcccggttgaatgcgtcgtgcgtaactacgccgccggcagcctggtcaagcgcctgggcgtggaagagggcctcaagctcaacccgtacaccttcgagctgttcctgaaggacgacgccaagggcgacccgttcatcaacgaatcccacgtcgtggcattcggctggggcaccgctgagcaactggcacgcatgaaggagttgtccctcaaggtcaacgacgtgctgagcaagctgttcgacgacgcaggcctgctgctggtggacttcaagctggaattcggcgtgttccacgacggctccatcgtcctgggcgacgaattcagcccggacggctgccgcctgtgggacaaggacaccaagaagaagatggacaaagaccgcttccgccagggcctcggtgacgtcatcgaagcctacgaagaagtcgccaatcgtctcggcgtaccgctttaatcgacgcaagcatctgatagcacggaaaaaaatcgcttcggcgctttgcatccacgaatcatgctgttatgatgcgcgccgttggagagatgccagagtggccgaatgggacggattcgaaatccgttgtaccttcaccggtacctagggttcgaatccctatctctccgccattacatagaaaaagccccatagctgaataagctacggggctttttcgttttggaatgtaatcgttccttcgctgtggccagcaagccttcaagcgtgatcctacttcttgcccttcggctttgacggcggctttttatccgtctccttcaccgtctccctaggcctcttctttgcctcagcctctgtcacgtactcccctgtgaccgcatcacgatatctagctggcatataacctccttggcagtatgtcgccacggcggcgactttttcaggctagtccagaggcctgggcgcacaagattcattgtgcgaattctcattaccaggcttttccatcgccgttgcggggttgtgacacccaacacctgaaaatgaaaaaagcctgctgaactcaaggctcagcaggctttttggtggtcgctgtttgcttatgcgggttgggccgccaagctgttacttacattacgccccagcaccagcaccgtcacaaagcctacgcccaccagcgccgtagccaggctcaacaacaccgagctgcccatctggtcgacgattcgcccgccgaagaatgaacccaaggcaataatcacctggaacagggcgacaaacagcggcatgccgcgttcgacatccttgggcgcgaccacgaacatccagatactggcgcaggccgggaaggcgccgaaggcaaagccccacaggccgatcagcatcgctgcgccggtcatgccggtggcgaagtaggggaaaagcgcggtgctggtgccgatcatcagtgcaaccagcatcaaggtgtggcgtacgctgcggttggcggcaaaaccggcaaaaatattaccgaagaccccggccacgccaaagagcagcaacagcgaaccaatcgttgggccgtcgaaaccggagctgtatttaaagaatggcgcgacataggtgtacgcagcaaagtgcgccaggccgatcagcaataccgcgatcaacccgacccgagcccgtgggttgatgaacaaggcgggcaggtcgcgcaccagaatggctttctccggatccagccgaggcaacaggaggacctgggccatcagcaccggtatacccaccagcgcggtgaccaggaacgtcatgcgccagcccatcaggccactgagccaagtgccgaccggcacgcccagaacggtggccagggtcacgcccatcatgatgatcgaggtcgccttggcgacgtccacacccttgggcgccaggcggccgctgagggcgatggccgtcgcccagaaaccgccgatgctgatgcccagcaagacgcggccgaatagcagcaggctgaagtcactggcgaacgccacgaccatgttggcgatgatcatgatcagcgtcagaccaatcagcaggtagcggcggtccatggcgccaatgatcaccgacagcaacggggcggcgagggcggccatgatgccgggcagggtcaccatcaggccggcgtggccggcactgatgccgaggtcggcggcgacgtcgttgagcacgcccactgggagaaattcactggtcaccagggcgaaggcaccgacggcgaccgagagaatcgccagccactgctgtttgacgctctgttgattatgttcgggaaggccgctgggggcctggctggcacttggcatggtgttgggttccagggtgaatgtcgcctgaggccaggcgagggggagggaaattggaggcgattataggaaccggtactgaaaatcgggcaggcgctcgtttcgatagtaatcatcagtgctatcgatgcgacgctctagcccgcacgacatggccagtacacctctcgcacatacgtccaaggtaatgcctaccggcagcgcgttgcgataccccgggcaatccttttggtcgctttattttccccgtctttctcagcagcagaaatattaagtagcacttccatcgacatcgctaaagtcctgccccggcgggccgaaacgctctcatacgacgtcgtatccctgataagagagtcccctgaaaatgtcccttcgcagcctgtccatcgcccgccgtgcgggtctgggtttcgccttgattgctttgctggtggccctactgggtttttttgcgctatcgaacatggcaagtatccgcgccaacgcggtgcaggttgaaagtgggctggtgcccaagatgcggctggtggcggatattcgcgaaatcatgttgcgcattcgtacgatctctttgcgcatggcgttggacccgaaccccgccagccttgcgcagtaccgcagccagatggacacccgtagccaggacctgacgaaaaggttggccgagcttgatgcggtcatcgacacccctgaagtgcgctcgctctatgaccagtttcaggtgtcgctgcgcctgtaccagcaaggtctggcacagtccttcatccttgccgataagcagcagggcgccgagcttaacaagctgctgctggtggacatgaaaaccgtggttgatggttccggtgcgcaactcaatgccctggctgactactacaacgcacagatcaatcagcagggtcaggaggcggaatcgcaatacagccgttcgcgcaccatggtggtcggcttcgtgctgctggccgccttgagtacggtggcgctggcgtggttattgactcgcagcattgtcggtccgttgggccatgcggtgcgggccgccgaaaacgttgcccacggtgatctgactcaaacggtagacgtgaccggcgatgacgaagtaacccgcttgctcgtggcgctcaagaccatgcagtccaatctgcgtgggaccctgcaactgatccgccagtctgcagggcagatggcgtcatccgccaccgacctgaatggcatcaccgatcaaagcagccgcagcctgcaaaagcagaccgctgaaattgaacaggccgccaccgctgtgaacgagatgacctcggcggcggatgaggtggcgcgcaatgccgtttccacctccgagtccactcgcctctctaatgaaacggcgcgcgaaggccagcatcgtgtcggcgaaaccgtcagcgccatccaggccctgagttctaacattggtgaaacgtcgacgctggtgcagaatctcgccgagcaatcgcgcgatatcggcaaggtactcgacgtgattcgctccattgccgaacagaccaacctgctggctctcaatgcggctattgaggctgcgcgggccggcgagtccgggcgtggctttgcggtcgtggctgatgaagtgcgcgcattggcgcaccgtacccagcaatcaaccctggaaatcgatcaaatggtgaccgcgatgcgctcggggtctgaccatgcactcacatcaatgcaatcgagtacccagcgtgccaccgataccttggccttggctgagggcgcgggtggtgcattgagccagatcaccgactctatcgaccagattcaccagcgcaaccttgtcattgccagtgccgcagaggagcaggcgcaggtggccaaggaagttgatcgcaacatcgtcaacatccgcgacttgtccgctcagtccgcttccggcgccgggcagattaatggatcgagccgagagctggcgcagttggccgtcgcgctgaacgaggcggtggcacgttttcagctgtagtgggactagggttaaggcgtgagtgaatcggactgcagttccaacacccgatctcttccgccttcggccactaaataggcacccggaccggtccgcacaatcgattgcggcgccttcaggaacgacaaaattgtctgctggtgcccttgcttatcgatcagtaacaggcgcgcccgatgagtcgagtcttcattgatccacagcccacgctcatcgcacatcaaaaacgtcggcttgttcaggttgctcaataccaccggatcgctgccgtcctgagtgagttcgtgcaccacgccttttttcttctcggtgtagagcatccgcccgtcagtacaacgcacgatggactcgccttcctgcaattggtcgcgaaccacggtgagggtctggtcgctccagcgataacgcagcaatcgcccgacgggtttgcggtcttcgatggcatagagatcgtcgccgtcatcccacaggccttgcacgttctcgcctttgaacagttcggtgacgacgccgtccttgaagaaactcacgggcaggtcggccgattcctggctgaacacccagccgccgcgggtggcgaacaggccgtcgggtttggacaggctggccaccaccacgtcgcggctgccgtcggggtggatgcgtacaatgctgcctttggccttgtcgagttcctggctgaccatcagcgagccgtccgccaggggcatcagtgaggcggccttggggacgtcgcggtgcaccacttggacactccaccccttggcggcactgacggggtagtaactctgccaggcaaaaaagcccagggttgccacgcacagcaggcctgctgcgcgcatgccaaatcggagcgccgggtatttttttggagcgttggtcatcgagagttgccagccgtcggggggaaagatcgtcgaccaccctaccaagcttgtcgctgaacttcacgcgtgggaaacccgttgccccgtttactggtgcctagtcctgctcccccacgccctgtctgattttttccagcaactcatcgatatgaaagggcttggtgagcaggtccatgcgttcgcccaggaagttctggcggttggccgcattctcggcgtagccggtcatgaacagaatcggcaggttgggatgcagggcgcgcgcgtggtcggccaactcccgaccggtcatgtagggcaggccgacatccgtcagcagcagatggatgctcgggtcggcctgcagaatggcgattgcttcgtcaccgtcagcggccaggctgcagcggtagccggcgtccatcaggacctcggcgacaaaactgcggaccgagggcatgtcttcgacgatcagtatatgttcacccttgctgttacctggcactgccacggtcttggtggcaagggtggcagggccgtcggcagcggggagcatgagggtcacctcggtgccctggcgggtgacgctgcggatctgcgcatcaccgccggactggcgggcaaagccatagatggtcgacagacccaggccggtgccctggcccacgggcttggtggtgaagaatgggtcgaacaccttatcgatcacgctgtgctcgatgcccacaccgttgtcccgtaccgacagtgcaacgtacgggccgtcttccagcttgaggtggccgttggagtacgatgggtaagtcgtcacccagataatcccgccctggggcagtgcatcccgcgcgttgatcaccaggttcagtaccgcactttccagttggatcgggtccaccagcgccacggcggggttgctggtcaactccagcttcagggcaatgtgttcgccgatggtgcgcaccagcagttcttccagggagcggatgtgtgcgttgatatcggtcggccgggtgtccagtggctgctggcgggcgaaggcgagcaggcggttggtcaggccggcggcgctaagggctgaactgagcgccgcgtcggcataacccaggaccttgtcggtgcgctggctttcgatgcgcttcttgatcagttccaggctggtgatgatgcccgtcagcaggttgttgaagtcgtgggcgataccgccggtgagcttgcccagggcatccattttctgggcctggagcagttgcgcctccgtacgtgcaagctgggtggcggcgttggccagttcggcctgctggtgacgttcacgatggcggtgttcggtcacgtcctcgacaaacaccaggctcagctcggcgcggtcatagggcgaaatctgccattcggtttcgcgcagttggccatcgaccttcatctgcagcgtgcccttccagcgctcgcctgccgcgaggcgcaagcacagctcctggataacgctatattgatcgctggcgaagcattcgagcagggcgtgcgggttgaggttgtcgtggatcagttgggcgaaggcgtggttgcactcgtgaaccttcaactgcgcgtccatcaccgcaatcggtgcgctgatattgaagaagatttcccgaaagcgcgcctcgctttcgcgcagggcgtattcggtgtcgcgtacccgcagcaaggtgcgcaaggtcgccagcaggacctcggggtctaccgggtggatcaggtaggcatcggcacctgcgtccaggccggtgatgatgtcgccggtctcgatggacgccgccgaaacgtgcaccaccggcagcaacgccgtggccgggttggcgcgcaaaccgcgcacgatatcgaagccgctcatgtcgggcaggttgacgtccaggatcagtgcgtcgatcttgccccttgcgatcaggtcgagtccttcctggcccgtgccggcttccagtacccggtagtgatgacgctcaagacgtcggcgcagggcgtagcgcgtggcggcgttgtcgtcgacgatcagcagctggatgtcacgtttcatcgacggtctcgctggcgatggaaaagggaatgatcacaaaaaacagcgagcccaccccaggtgtgctttccacgcccacccggccaccgagcagttcggcgaaacgcttgcacaaggacagccccaggccggtgccgcgcagacgtttttgcaagggcgaatcgatctgggaaaagtcttcgaacaggttgctgtgcaattcggctggtatacccaggccggtgtcctgcaccgcaaagcgtatctcgtgttcattctccatgcgcgccgacacccgcacttcgccctgcgtggtgaacttcagcgcgttggagataaagttgcgcaggatctgcgccagtttcttgtcatcggtgtagagcttgggcaagccggacggctcttcgaagatcaggtccaccgaggacgcatcgacaatcggccggaacatgccgcgcaatgccgagaacaggtcgaacatgtcgaaccaggccggggaaatgctgatacgcccggcctcgatcttggccaggtccaacaggtcatcgaccatctcgcgcagttcgcgggccgagttgcgaatgaagccgacctgggtgtgctgttcctcgctcaacgggccatccagctcatcggccagcaggctggtgatgctcaggatcgagcccagcggtgtgcggaactcatggctcatgtaggacaggaagcggcttttgaggtccgatgcctggcgcagttgatctgcctgggtgtccagttcggcatacagcgcgagcacgccttggttggtttcgtccaactcggcacgcaaggcgtccgcctccaggcgaaggcgttcgatttcagcggcgagcgcggcaggggtgtcagccatcaatggcctccagggcaatcacgaagaccgtgacgtcatcccggccgcgacagaagtcacggtgcaggacggcggcgatcagggcagggtggcggtggacgagcccggggtagtccgaaaggttccagcgtgattgcaggccgtcgctgtagaggatcagcaactggccgccgacttgagcgtagtcgaaggcatgcgccttgcgaaactgcacgccgacgatcccagggtgcgaagccagtccccgggacttgccaggcccgatcaggctggcgccaatattgcccacgccggtaaacctcaggtgatcggcctcggcatcgtactgcgccacggcaagggcgccgccgcgagtgccgttcatggcaatgtgcagatcgttcatcagcaccgtcgaatccaggaaggcatcctgggcaaataccacttctcctgcccgcgcggcgtgctcggcatattctccatggccgagtccatcggccaccatcacactgaaacgaccgggttcgattgccaggtgccaggcatccccgcagtgcgggtcgtcatgcagtgagtgctggctgaccccgtagcgaatgtcttttgcaaccgaaccgcgcggatacagcctggccaggatcgccgtgccgcgttgatcggcgtaggcatcgaatacctgggccaggcgcgaaattgcgcccaggccaatgccttgggtacctccggtggagtagccgtccaccaggcagctgttcaggtcgaagccgtggccacggtcgatggcgaccagttcgaggccaccattgccggtggtgcgcaggtgtagttggccgtgctcggcatgcttgaggatattgctggccagttcagtggccaccagggccacgcgcccggcatcggtgtcgtcgaagcccaactgctcggcgagctgctgcgccgtgcgacgggcatgaccgatctggctggtgtcctcaatcagcagtacatgcgtcagggcgctggggatgttcaggcccatcgggtgatcgtcacgcgggtgccctggcctggcgcggtctccagttcaaattcatccaccaggcgcttggctccggtaagccccaggcccaggccgctgccggaggtccagccgtcggtcattgccagcttgagatcgggaatgcccggcccttcatcacgaaaggtcaggcgcacgccgggtcgatggtctttttccaccaccgcccaatccatgtagccgcccttgccatagaccaccgtgttgcgcgccagctcgctgaccgccgtgaccagcttggtcaggtcgatcaggcgcatgccgcagtcctgggccagtttgcgtacgagttgtcgagccagcacgacgtcctgttcgatcagcaccgggtgggtgccattgctggcttgggtcatgagtgttctacccggtcacgcagcagtttcatgccgcgctcgacattcaacgccgtcgccacgccaggcagggtcatgcccagttccaccagcgtaatggccacggccggttgcatgcccaccaatacggtctgggcatccatgatgcgtgacaggccggaaatggtaccgatcatgcgtccgatgaacgagtcgaccatgtccagcgccgagatatcgatcagaacgccgcgggcggaagtgcggttgatgcgttcggacaagtcgtcctgcaaggtcagcgcgagttggtcgtgcatgtccacctggatggtcacgagcaagaactcgcccatctgcaaaatagggatgcgttccatgcttaaacggccttggtgacggtgacgcctaggcgtttgagggagagtgccagcgcgtcggccaggttggccttggtcaccacgccttgcaggtcaaggcccaggtgcacgatggtctgcgcgatttgcgggcgtacgccgctgatgatgcaatcggcgcccatgaggcggatggccgtgacagttttcagcaggtgctgggccaccagggtgtcgacggttggcacgccggtaatgtcgatgatcgcgatttccgcgccggtatcgacgatgcgttgcagcagcgactccatcaccacctgtgtgcgttgcgaatccagggtgccgatcatcggcagggccaggacgccgtcccacagcttgaccaccggggtggacagctccagcaactcttcctgctggcgcttgatcaccgactcccgggatttctggaaggtgcggatggtgtgcatgcccagggcatcgagcagttcggagatcttcagcagttgttcggccagttgtgccggttggtcggcatattctcgctgcagcaggatgaacagcggacccttgagggcgaagataaagctggcggtctgttgcgagtcctggccggcgagggcgcggctgtgggacaacttttccaggaatacgcgggtttctgcccagttgtcatggtcggtgttctgcgagctgccttgttgcagggctgtcgtcagcaggttcaggaactcctgggtttgctgtttgacgtcatcgcctttgatgttgcgcgtcgcccctgaggtatcgaggctggcattccattcagcaaggagggcgctgcgattgtcctgcagggcctggattgtgttcgtttgcagagttgccacggggaacctccttgaatgccatcgatgggaatcgcgcaatttatactaaaacgaactgtttagaattgtttccggtggaatcgttcattagtggcactgcgacattaatcggcggtggacccctcttgctgtgacagcacggcgtaatcctggccgccgtagaaaattcccagaatcgacaccctccgcgcacgtgcatccaccctgaatgcgatgacggaggaatgccgataatgcgtaatgcgtaggccaggcagcacgtcgtcccggcgggtgccatgtaaaggaaacatggtcaggttttcgcagcaggtcacgaggttgtcgacgaagcgtgcggcgaccagcggcgagccggtatcgctgatgtagtcttcaagggcgtcaagttgggtcagtgcctcgggcgaaaaggtcactgaatacttcacgttctatcgtggcctttgcgctggcgtttggtggccagatgctcacgaacctgctcggccgataacgcccggccggggttggcatcgagcgccacggcggcggggataacctggtcgcgcagccagtcatccatggcgccatcccgtgccagcaaggcccgcaggccgtcgcggatcacttcgctttcggtggcgtattcaccggcagcgaccttggccttgaccaaggcagccatttcgatgggcaaggtaatgctcatttgctgggttgagcgcatttggacgtccgccaggggtgagtaggattcaatcctacttgaccattggcgtgatgcaaggagcatctggtcaaagccgatatccggcgtctcgtcgtccatccagaagtgataggtttccatgagtgagtccatctcccgttgtgtaggtcaggccgcaagtattgacccatttcaacgattgcgtggtcgcgggcagccaataacccgctgatatgtatgacttcatatttgtagcagggttattacggcaaaccggtcctggcacacatggcgccccacccgctcccatacgataatgcccaccccctcgaccactctggcctcactcccgtgatcatcaacttcgacctcaacgacctccaggccttccgcgctgtggtagacaagggcagtttccgtggcgccgccgaggccatccgcatctcgcaaccggccctcagccgacgcatcgaaaagctcgaaaccgccctggatgtaaaactgttcgaacgcaccacccggcgcgtcagcctgaccatggtcggccgcgccttcctgccgcaggtggagcgcatgctcgatgacctcgacgtggcgctgatgggcatcagcaacgtcgcgtccacgcgcatgggcaatgtcaccatcgcctgtgtgccgtccaccgcctactacttcatgccccacgtgatctccgagttccacaagctgtacccgaagattcgcctgcgcgtactggatgccagtgccggcgaagtgtgcaatgcggtggagagtggcgaggcggatttcggcgtgagtttcagcggcagcctggccgatgaggtggagttcgagctgttgctgcaggagcgctacgtgctggcctgtcgtcgtgaccacccgctggcccagcgcgacagcgtggcctgggccgaagcctttgagcatgattacatcacgctcgacaaaacctccggcaaccgctccctgcttgaccaggccttgcgcggcgtgcgggtgaaaaagccgagtatctgcgaaacgcatcacgtgaccaccatgatcgggctggtggaggcggggctgggggtggcgatggtgccgtcgattgcgatgccggcggtcgagcatccgattctggtgagcgtgccgctggtggagccgcaggtgatgcgcaacgtgggcttgataaaacgccgcgggcggactttgccgccagcggcgctggagttggagcggttggtgcgggagatgccgttccggtcagcgtgacaccgaatccagcccggtggattgcaccaccggttgcacctcgggcgaggccagaaattgcaacaacgccttggcctgctccggatgttcggcgttgaccggtatgcccgccgcaaagcgtgtcaccgattgcacgtcttccgggatcttgccgacgtaggtcacaccgggcaccggcaacaattccgcgacctgctgcaagcccacttcgtagtcacccttggccacctgctcggccaccggcaggcgttcgatcatggtgcctttggcgggcatgccgagcttcttgaacagctctttctcgacatacacaccgctggcgctgtccgaataggccaccgatttggccttgctcagggcggctttcaattcggcatcggtgccgatggccggtttgacggcgccggccttcaccaccaggccgatgcgcgagtctgccagctccacgcgggaggccgggtcgaccttgccctgcttgatcaagtcgtccagagcgtagccgaccatgatcaccacgtcggcgtgttcgcctcgggccaggcggttgggaatcgcttccggcgccttgcccatcgacgggccaaggatagtgtccagggtatcgccgctgtgcttggcgtattgcgggccgagcaacttataagcggcagtgaagccacccgacgtcatcaccttgagctgttcggcctgggccgacagcgccagggcgccgagggccagtgctgtcagggtcttgaacagaagcttcatcacgcggccccctgcatcacttggccacgggcattggcgcgacggtacagcgccagggtagagcacaacgcgcacagggcggcgaacatcatccagtaggccggcgaggccttgtcttcggtgatgtgaatgaaccaggtggagatcgccggggtgaaaccgccgaagatcgcggtcgccaggctataggccagggagaagcccgccacacgcacttccaccggcatgatttcggtgagggccgggatcatggcgccgttgtacataccgtagaggaacgagaaccacagcagggtttccagcatgtgggcgaagctcggtgcgttcaccacgtaggacagtgctgggtaggccgtgagaacggtcatcgcggtcatggcgatcagcactggcttgcggccgaaacgatcgctcaacgtaccgccgatcggcagccagacaaagttcgacaccgccaccagcagggtcaccagcagcgcatcggacgtgctcagttgcagcacggtcttgccgaaagtcggcgcgtacacggtgatcaggtagaacgcggtagtggtcatggccaccatcagcatgccgccgatgaccacggtccagtttttcaccagggtcgccatcacttcacgcatggtcgggcgatgtttgcggttggcgaattcttcggtttcctgcaggttgcggcgcagcacgaagatgaacgggatgatcacgcagccgatggcgaacggaatgcgccagccccagtcggcaaccaccgagggttccatccacacattcaggccataacccagcgcagcggcgaccacgatggagatctgttggctacccgattgccagctggtgtagaagcctttgcggcctggggtggccatttcagacaggtacaccgatacgccgcccagttccgcaccggccgagaagccttgcagtaaacgaccgagcagcaccagcagcggtgcccacaggccgatggtgtgatagccgggcaccagcacgatcagcagcgtgccgctggccatgatcgacaaggtcacgatcagccctttgcggcgcccgacgtcatcgatataggcacccagaatgatcgcgcccaacggacgcatcaggaagcctgcgccgaacacggcgaaggtcatcattaatgacgcaaattcattagcggcagggaagaacgcggcagcgatgtaggtggcatagaaaccgaacaggaagaagtcgaactgttcgaggaagttgcccgaagtaacgcggaataccgcacccactttcgagggggcagaatcgggacgggtagagctagtcatggttttatgtctccagcgttcttttaaagtgcttgtttcgcttaagacctagcatagtggctgacacatttagaaatgaaaagtgacaaatttggatagattgatgtgttttggctatcaattggtaatgcggtcggaaatacattcgctgtctatgctgaagatgtgaccaattcttacggatgggaggtggcaatgactgatcaacagaaacggcgggacgagtcggaacgtgagcagccccggcggcatgaggaagaaaaaccgcagacctggaaacatcccgatgatggcaccgagctttcagagcgcgaccaggagcgtccgctgaaaccctgatatcagggtttcagcggnnnnnnnnngggagtgggcaagcccactcccacatttgtatgtgcaactcccaaaatcaggaaactatttgacatatttgatttgtgatcacatattgaggccataagaaccacaacacaggttttgcctcatgacagatggtccgctcctcctgcccaccctgcgccaggtgtcccgcgataccttgcaagaccaggtctaccgccagatccgcgaagcgttgatgagtggccgtttccagcctggccagaaactcaccatccgcggccttgccgaagcccttggttccagcccgatgccggtgcgcgaagccctgcaacgcctcagcgccgaaaacgcctttgaagtcaccgagacctcccgtctgcgtgtacgcctgatgacggtcgaacgcctgcgtgaaattcgtgatgcacgggtcgccctcgaagggctgctggcggaaaaagccgtgctgcgcctgcaaaaggctgacctcgacgaaatcaccgacctgtgccagcaaatgcaacacgccgccgacgaagtcgacgtgtcgcgctacctgtggaccaactttgcattccaccggcgcatctacgccgtggcccaggccgagctgaccatggccgccgtggaaaacttctggctgcacatgggcccgtgctttgcgctggtcgccccggataaagctcacctgcaacgctcgatggaggcgcacacgcgcattgtcgaggcgctggctgcccgcgatggcgccggcgcccgtgcagcggtgaccgatgacatcatgcaggccgccgactccctggcgcgcctgctcgtcaagaacgaccgttcgcggtcgtctgcttcaggaggtaaacgtgcatgagtgtcctacagcggctgcagccctatcctgggttacgtgtgttgatttccggcggggctgccggcattggtgaagtgctggcggcggcgtacctggaagccggtgcccaggtgcatgtgtgtgacgtgagcgagccagccctggccgcgtttcgcgacaagtaccccggcaccgtcgccacccgcgccgacgtcagcgatgccgcgcagatcgaagcggtgttcacggtgcagcgcgagcatttcggcggcctcgatgtgctggtcaacaacgccggaatcgccgggcctaccggcggtatcgatgcgatcagcgacgccgagtggcaagccactatcaacatcaatctcaccgcgcaataccgctttgcccaccacgcggtgccgatgctcaagcaatcgtcccacggccacctgctgcatatcgcctcggtagcggggcgcttgggctacgcgtggcgcacgccgtatgcggcgaccaaatgggcgattgtcggcctgatgaaatccctggcctcggagctgggcgagagtgatatccgcgtcaacgccttgctgcccggcatcgtcgaaggcccgcgcatggacggcgtgatccgcgcccgtgccgaacaggtcggcgtgccggaagccgagatgcgccaggaatacctcaacaaaatttccctcaaacgcatggtcaccgccgaagacgtggccgccatggcgttgtttctctgttcgcccgccgcacgcaacgtgaccggccaggcgatcagcgtcgacggtaacgtcgagtacctgtaagccacggaagaacacatcgcgcagcacccaggatttttttcataagaataaaagtcggagattcgtcatgtccaaaaatcgtcctgtcatcatcacctgcgccgtcaccggtgcgattcatacaccgtcgatgtcgccgcatctaccgatcaccgcgcaggaaattgccgacgccgccatcggtgccgccgcagccggcgccgcgattgttcatctgcatgcccgcgatcccaacgacggccgcccaagccaggacccggcgctgttcgccgaattcctgccgcagatcaaggccgccagcgacgtggtgatcaacatcaccaccggcggcgcgccgaccatgggcgtggaagagcgcctgcaaccggtgatgcagttcaagccggaactggcctcgctgaacatgggctcgatgaacttcggcctgtacgaaatgctcaaccgctttaccgacttcaagcacgactgggagcggccgtacctggaagaaagtgacgaccggatcttccgcaacaccttccgtgacatcacccacatcctcaattcctgtgccgagaaccgcacccgtttcgagatcgagtgctacgacatcggccacctctacaccgccgcgcatttcctggagcgcggcctgctcaagccgccgttgtttatccagtcggtgttcggtttgcgtggcggtatcggtgggcaccccgaagacctggcccacatgcggcgtaccgccgaccgcctgtttggcgacgactatgtgtggtcgatcctcggcgccgggcgtgggcagattccactggcgaccatgggcctgtccatgggcagcaatgcgcgtgttggcctggaggattcgctgtgggacggcccgggcaaattggccgcgtccaacgccgaccaagtgcgacgtatccgcacggtgatcgaggccctcggccatcgggtcgcaacgccagatgaagcgcgggaaatccttgggctcaaggggcgcgaccaggtcaatttttaatccgaaaaccgccgcgtcacggcgcggcctgcatcccgcacaacaacaataaggggatcacaccatgcgtatcgaagtgcttgtcgacgtcaagaccaccctgggcgaaggccccgtgtgggacgtcgagcaacagcggctgtactggatcgacagcgccgacggccgcatcctgcgctgcaccgacgatggccgcgaactgcgcgcctgggaggtcggccagaaaatcggctccatggccctgcgccataacggtgagtcggcgattgtcgccctgcaaaacggcgtgcacaccctcgacctcaaaagcggcgggctcaacctggtcatcgacccggaaccgcacctgccggataaccgcctcaacgacggcaaggtcgaccgccagggccgctttatcttcggctccatggatacccaggaagacagcgccagcgccaggctttaccgcctggacgccgacctgagcctgcacaccctggacgaaggcatcatcgtgtccaacggcccgtgctggagtccgtcgggcgagaccttctacttttgcgacacctggtctggcgagatctgggcctacgactatgacctggccaccggcaatgtgcgcaatcgccgcaccctcgccaaggtcgacacctcgggcggtggcgctgccgatggctgcaccgtggatgccgagggctgtttgtggcaggcgctggtctatgccgggaaactggtgcgctacacccccgatggacaggtcgaccgcatcattcagatgccagtgaaaaaggtcaccagcctgacctttggcgggccgaatctggacaccctgtttgtgacctccatggccaagccgccgctgccgcgttttccggcagacggccagcagcgcggagcgctgttcgccattaccgggttgggcgtgcaaggaatagccgagcaacggttcgccagctagcgcgtgtgtgtgacaaggcatattccttcgcaaccttgtgtcagtgcgcgccctcgcgcgcctggagaggcccatggcaactatcaaaaaagcgtcgctgcgcagcattcaccggcattcctgggtgtcgctgctggtctgttggatgatctggatcctcaacgcctacgaccgtgagatcgtgttgcgcctggggccgaccatctccaagcatttcgatttatccgccgaccaatggggcaccgtggccacggtggtcatgctggccctggcgttgctggatatccccggctccatgtggagcgaccgctacggcggcggctggaaacgtgcgcgcttccaggtgccgttggtgctgggctacacggcgatctcgttcctgtctggcttcaaagcgttgagcggcaacctcgccaccttcattgccctgcgcgttggggtcaacctcggcgccggttggggtgagccggtgggggtgagcaacaccgccgaatggtggccggtggagcgacgcggctttgccctgggcgcgcaccacacgggctatccgattggcgcgatgctcagcggtatcgtcgcgagttttgtcatcaccgtgttcggcgaggacaactggcgctacgtgttcttcttcgccttcgtggtggcgctgccgctgatgattttctgggcgcgctattccaccgccgagcgcatcaccgcgttgtacgtcgacatcgccgccaagggcatgacgccgccggacaacgccccagccagttcggtgaagggcgaggcctggcgtaccttcgtcgccaccttgcgcaaccgcaatatcgccctcacggcgggcaatacgatgctcacccaagtggtgtacatgggcgtgaacatcgtgctgccggcctacctctacaacatcgccggattgtccctggccgagtcggcggggatgagcgtggtgttcaccctcaccggcattctcgggcaactggtgtggccgtcgctgtcggacatcatcggccggcgcaccaccctgatcatctgcggggtgtggatggcggcgagtgtcggcgcgttctacttcgccaacaccctgaccctgatcatcgtcgtgcaactgttgttcggcctggtggccaacgccgtgtggccgatctactacgcggtggcctgcgactcggccgagccgtcggcgacgtccaccgccaacggcatcatcaccaccgcgatgtttatcggcggcggcctggcaccggtgctgatgggcagcctgattgccatgggcggcggctggaccacgctgcatggctacaccgtgtgtttcttcgtgatggccggctgtgccctcggcggcgcgctgctgcaactgttttcccatcgcccccaggcgttggccctgcaactcgactcctagaacaacaccgatgcgccccccagcccgcctggcggggcgccaagaggaactgccgatgactaccgccaccgccgcccgcaccccgcaggcgttgaacaaactgatgttcgtcaagctgatgcccttgctgatcatcgcctacatcctgagcttcctggaccgtaccaacatcgccctggccaagcatcatctggacgtcgacctgggcatttccgctgccgcctatgggctgggcgcggggctgtttttcctgacgtatgcgctgtcggaaatccccagcaacctgatcatgcacaaggtcggcgcgcgcttctggatcgcacgtatcatggtgacctggggcctgatctcggcggccatggcgtttgtgcagggcgagacctcgttctacgtgctgcgcctgttgctgggcattgccgaagccggactgttccccggcgtcatgctctacctgacttactggttcaaccgtgaacaacgggcgcgcgccaccgggtatttcctgctcggcgtgtgcttcgccaacatcatcggtggcccggtgggcgcggccttgatgcgcatggacggcctgctcggctggcacggctggcagtggatgttcctgctcgaaggcttgccggccgtggcgtttgcctgggtggtgtggcgcaaactgccggaccgcccgagcaaggcgccgtggctgtcggccgaggaagcgcgcgggatcgaacagcgcatcgcccaggaaagcgaagagggggctggcgcgggcggtcactcgttgaagaactggctgaccccgcaaatcctgctggcgatctttgtgtacttctgccatcagatcactatttacacggtgatctttttcctgccgagcatcatcagcaaatacggtgaactgagcaccatgagcgtcggcctgctgacctccttaccgtggatcgcggcggcactcggtgcgctgctgattccgcgtttcgccaccacgcccgggcgttgccggcgcttgctggtcacgggtctgctgaccatggcgttgggcctgggcattgcctcggtgtcggggccggtgttcagcctgctgggtttttgcctgtcggcggtgatgttctttgtggtgcagtcgatcatttttctgtacccggcttcgcgtctcaagggtgttgcgctggcgggcgggctcgggttcgtcaacgcctgcgggctgttgggcgggtttgtcgggccgtcggtgatgggcgtgatcgagcaaagtaccggcaatgcaatgaatggtttgaaagtcattgcgttggtgctggtggtggcggccgtggcagccctgcgcttgcgcatggggcacgagcctgagcgtggcgcccaggccagcgaagcgtcctacacgtagacgccggcaacgggcctttctacactgcggcttgtcttggggaaaagggcaggcgccgatgaatcgcaatgaactacgcaaagccgacatcaacctgatggtggtgttcgaagcgctgatgctggagcgcaacgtgacgcgggtggcggagaagctgtttctcggccagccgaccatcagctcggccctcaaccgtttgcgtaccttgttcaacgacccgctgttcatccgcgtcggccaccgtatggagcccaccgcgcgggctgaggagatcatccagcatctgtcgccggccctggattcgttgtcatcggccttgagcctgacccacgatttcgacccgtccatcagcaccatgacctttcgcatcggcctctccgatgacgtggagttcggcctgttgccgccgctgctgcgcgccttgcgccaggaagcgccgcaagtggtgtttgtggtgcagcatgtggactactggcgtattcccgacctgctggcctccggcgacatcaccgtcggcatcacccagacccgtggcctgccggcaaatgccaagcgcaagctgctgcgccatattcgcccgcgcatcctgcgcgccgatgcctcggaaacaccgctgaccctcgacgaatattgctcacggccccatgtgctggtgtcccacaccgccaacgtgtcggggtttgccgatgagtggctggcggagatcgggcgcaaacgccatgtggtactgtcggtgccgcagtacagcgcgctgccggccttgctcgccggcaccgacctgatcgccagtttgccggactacaccgccgaggccatggcggtgtcgggccacctgttctgtgggccgttcccgttcgaaacgccgaccctggatttgtcgatggtctggctcagccacgtggacaccgacccggctgagcgctgggtacgttcgcggcttgaagcgtttatgagtgacagagggctggccagcaaagcctgatgcttttatccgtggtatatctaggaatcttcctaccaaagactcggagccatccatgccacacctgcacctggaatacaccgccaacctgacaggcctcgccgtcgagaagaccctgttgcggctcaacaacgtgctgatggcgtccgggcagttcggttccgagttcgatatcaaaagccgtgcggtcaaggtcgagacgttccaggtgggcacttccctcgacccgcgtgggtttatcgcagtgaagctgtcgctgctcagcgggcgctcaccgcaggtcaagaagcagctgtcggaaagcctgctggcagccctgcaggatctgggcgactggccggtaggtatccaggttcaactgagtgtcctgttggtcgatatggaccgcgacagctacagcaaggtcgccgtcggctaaggtttacaacaaaccctgatccgcacacaccttcaccacctgctcacgaaaccaggtattggcgctgtcctgttcgctggtttcattccactgcatctccagggtgaaccccggcaagccgttgggcgcttcgcaatggccgaacgtggtggcgggcgccagcagtttttgcacgcggcgcggcaaggtgacgatgaagtcggtgccggtgatcatcttcagcgctgcgctgtagctgttggcgcgggcgatcacttggcgcttgtgggcctggcgcgccagccagccatcgatcatgttggtgtcggaggtccacggcgtagggaacacatgacgccgttcgacgaaggactgcaggctgaaggccggttcccgtggcgctgagcgtttatcgaacacacagaccaggtcgtcttcgagcagcatctgggtgcggaagtccttatgggcgcggtggaaattgggaccgaagcagatcaccaggtcgaggcggccttcgcgcaggtcgtcggcggggatgtcggtttccaacttttgcacgttgacgatcaccggcaagtcggcacggtcgaagtgcttcaacaggcgcggcaggatcaactgttcgaagtattccggcgcgcacacattgaacgtcacggccttctgggtcgggtcgaaggcctggcctccggcgtggcacaggttgatgctttcgaggattttctgcacatgcccgtacatggtggtggccttatacgttggccgcatgcccgcccgggtgttgatgaacaactcgtcttcaaagctggtgcgcagcttcttcaggctgtagctcacggtggactggctgacaaacagtgtttcggacacctcggtaacgctgctctggtcgtagacggcgataaataccatcaagtcctgcatatcgagctttctgagcaagttactgtttagcatcggtttcgtccgtaaacctgttgtaccgaactcagtacaagacagcgcaaaagcttaacggaacgagcgtgccattagaaagctctgtagggcgtttctatgtttggtgtgagacaaatactgtttgcaacacgacctcagcggatatgtcgtgcgtagtgccttggattgaagcgcgtgacgatcagcagcatcagcacgatcactgctgtcagcgtccaccaggcccactcgaaactgcccagctgatcgcggatcatcccggcgatcagcggcgacagcccggcgatcaggtagccgatgccctgcacaaaggcggtgaggccaccggcgcggcgcgggttgtccaagtggtcgagggacaggatcaggctcatcgggaacaggccgccaatgcccaggcccagcaggcatggccacaacaggctcaggtggtgcgggctgagaatcaggccgcagaaacccaggatgatcaataccagcagcaccgtcaccacaccgcgtttatcctggcgacggttggcgatggcaggggtgaccaggccggagaccacttccatggccgtcaggaagcccaggagcaggccggcgttctgctcgctccagccttgctccacgtagtaaggcgccagccacgccagtacgcaggtgtaggacgcagtgcccaggccgaaaaatactgcgagcaaccaggcacggccattgccgaaaaacgactcctgcgggcccgcaccggcttgcggcaacggcggcaacaccgagcgttgcgcgtaccagaacaccaacgccagcaccgccaacgccgcccagatcgccaggccgatgcgccagctgtcggtctgcacttgcacgaacggtgcgaacgacgccgccagcgctgcgccgcccatgatcgcggtgacgtacaaccccatgaacagcgaaacattgtcactgaaccgcgacttgatcagcgccggcatcaacgcctggatcatcgcgatccccacgccggccgcgatagcgctgacgatcaactccagcgccgaatcgaggaacagccgcgacaacgtggccacgccaatcaccaacagggacaccacgatgctgcggtgctcgccaaagcgtttggccaggcccatgccgaagaacatcgccaagcccatggccatcaccggcaacatggtcagcaacgccgcgctgctgaaactcaacggcacatcgccgcgaatcgatgacaacaacgggccgaccgccgccatcgatgggcgcagattgagggcgaccagcacgacactgatcatcagccagatggcggtggtgggttttgcgtgaacggtttccatgggacgcccttgagtgaacaagggcgaatcaggccatgggcgggggagtggggcaaatgagaaagtcgctaggtctatctaaaaattgcgctggtcaaaatgtgggagggggcttgcccccgatggcagtgtgtcagccaacaaatctttgactgacccacctttatcgggggcaagccccctcccacattagatagagcggatcacatgcttgatctcctggaacgccgccaacccccacggccccagctcgcggccgatgctgctctgcttgtaaccgccccacgcggtctgcgggaagatcacttgcggcgcgttgatccacaccagcccggcctgcaaggcattcgccacacgctcggcggtttcagcatggcggctgaccacactcgccaccaggccgaaatcgctgtcgttggccagggtgatcgcttctgcctcagaggtaaaacggcggacacacagcaccgggccgaagatctcttcgttccacaacgcgctttccaggggtacgtcggtgaacaccgtggggcgaatgaaaaagcccttgggcaagtccgtcgggcggtcaccgccacacagcaagcgggcgccgtcttcgatgccacgctggatatgccccagcacccgctgatactgcgcgcggttgatcaacgcacccatttccacgtcatcggcaaacgggtctgccacgcgaatggcctcagcccgtgcctgcacacgcaccaggaattcatcggcgagcgtgtcagccaccaacacgcgactggtggccgaacacatctgcccggcgttgaaaaaaccgccgccacaggccagttccaccgccaggtccaggtcggcatccgccagcaccagcagcgaagacttgccgcccatttccaggctcacacccttgatggtttcggccgcgcgttgcatcacctgcacgccaacggcgttactgccggtgaacgatattttcgccacacgacggtccgctgccagcggtgcgccgaccgccaaacctgtgccacacaccaggttgaacactccagccggcaagccggcctcggcgataatccgcgccaagtgcaactcggccaacggcgtgacttccgagggcttgagcaccacgcagcagccggcggccagggccggggcgagtttccaggcggtggttaccatcgggaaattccacggcacgatcagccccaccacgccacagggctcacgacgcaggcgtgcgctgaagtcatcgctgggcagtgccaccggctggtcctgagtggcgtccatttcttcggcaacgctggcgtagtactcgaacgtggcgatcacatcgtccacatctatcgcggcttcaaacagcggcttgccgttgttgctcgactgcaggtgcatcagctgttcgcgctgctcgctcacgccctgggcgatcttgcgcagcagggcggcgcgatcacggccggtgctgttcgaccactcgctgaaggccgcgctggcggcgtcgaccgcctgggtcaccgccgccgcatcgccgacgctgacccgggccaataccgcctcggtggccgggttgatcacctcgagtacggcttggccggctcgccacgcgccgtcgatgtagatcccgttcgacaccacgctcataccgccaccttcttcatccacaggccttggtcgatttcaatcagtgttggcccctggcgatcagcggcgctgcgcagtgccgtccgcagatgcgcgatgccctggatgctttcagcggcacagcccaacgccttcgctacgccgataaagtccggcgtatagatgtccacacccaccggttcgatggcgcggttgaccatgtatttcttgatctcttcatagccctggttattccacagcagcacgatgatcggcgtgcgcgcctccacggcgctggccagttccggcaggctgaattgcaggccgccgtcgccgatcaggcacaccaccggttgcccgtcgccgcgtcccagccaggcgccgatagcggcgggcagggcgtagcccagggtgccgtagccagtggatgagttgaaccagcggcgcgggtggtcgaggttcagggtgaggttgccgctgtacaccggttgggtcgagtcgccgaccagcacggcgttgggcagctcctccaggacggtgttgaggaacagagtttgtgcgcgggtggcggcgtcccagccggggttcagttcggcccacagacgcgcaactcgcgcagcgccccaggtgctgttgcggggtggcaatggcttgctgttgagcgcgttcaacaaggcttcggcagcgatctgtgcatcggccaccaaggcaacctgcggcggatagttgcgcacggtctggtccgggtcgatgtcgatccgcagcaacgcgccgggaatctcgaagccgccggcgaaggtgacgtcgtagtcggtttccgccagctccgtgccgatggccagcaccacgtcggcttcggcgaccaaggcgcgggtggcgaccagggtctgggtcgagccgatcagcagcggatggttggccggcagcatgcctttggcattgatcgtcagggccaccggtgcgccgagtgcctcggccagttgtgtgagttctgcggcggcgtcgatggcgccgcccccggccaggatcaacggctgcctggccgccgcgagcaactggctcatctgcttgaccgccgagggcgccgcaccggcgcgtgccacgctgaccggctcgctgcccagcagcgcgtcggcgttttccaccagcacatccagcgggatttcaatatgcaccgggcgtgggcgcccggcctggaacaacgcaaaggcacgcgccaacacgccgggcaactcggccgccgacatcagggtgtgggagaacgccgccacgccggcgatcatcgcgccctggttcggcagctcatgcaacttgccgcgcccgccgcccaattggctgcgcgactgcacgctggagatcaccagcatcgggatcgagtcggcgtaggcctggcccatggcggtggtgatattggtcatgccggggccggtgatgatgaagcacacgccgggcttgccgctggtgcgcgcatacccatcggccatgaagccggcgccctgttcgtggcgcggggtgacgtgacggatgttggaacgggccaggccacgatacagctccacggtgtgcacgccggggatgccaaacacctggtccacgccatagccttccagaaggttgaccagtacttcgccgcaggtcgccataaacgtcgctcttattgttgagataaggcgttattggaccggctggccggtagcggcaacaatcgataaaaagtcatactagccatgtcctcacgtcatggctgcgccccgatgaaacgcctcccgccgctgcccgcgctgcacaccttctgggtcacggcccagtgctgcaacttcacccgcgccgccgagcaactgcacatcacccagggcgccgtgagccgccaggttgccgggctggaaagctacctgggctacacgctgttccaacgccaggcgcggggcttgagcctgaccgaagaaggccgcgaatggtcgctgcgcgcgcagcaggtgtttggcctgatcggcgaggcagtggagcagatcggcagtcgccgccaggtcctgcagctcaaggcctccacctgtgtgatgcgctggctgttgccgcgcttgatgcagtggcaaaaggcgcgcccggacgtaccggtggagctcaccaccaccgtggcctacaccgtggattttcgccgcgagcaattcgatgcggcagtgatctatgcgcctatcgccgagcagtcggccgaggcgcggcatctgttcgacgaacaactcaccccggtctgcacccctgcgatgctcggcgttctgcactccccggcagacctgcagcaacaggtgctgctgcaccccacgcgggatgaacgggattgggcgttgtggttgaaggcggcgaagacgcgcctgagtaacctgagccaggggcatcattttgaaacgctggatttggcgatgacggtggcgtcgcaaggctccggcgtggcgattggcgaccgtgcgttgattggcgaggatttgaaggccgggcggttggcgacgccgtttgagctgcgggtgccgacggggatgggctattacctggtgtatccaccgggcaccgagccttcggcggggcttgaagccttgatggattggttggtcagccaggccagaatctcctgacactcacatttcaaatgtgggagggggcaagccccctcccaaatctcagtagccgacggtaaaacgctggcgcgagtgcttcggcgattcgacttcgtcgatcaaggcaatggcgtagtcggcaaagctgatccagctgcgaccttcactgctcaccagcagatcgtcctggcccacgcggaattgcccggtgcgctcggtctcgacgaactccgccgaaggcgacaggaaggtccagtccagttccttttcttgacgcagcgtgtcgagaaacgctgcgcctgcactggcttcggctttgtactcagccgggaaacccgcgctgtcgatcacccgaccaccacccggcagcaacagcgaaccggcaccgcccacgaccagcaggcgtttcactccggctttcttcaccggcccgatcaccgcgctggccggcagggtggcgaagtgcgcggcgctgatcaccacgtcactgccgctgatggcctgttgcagggcgtctgcgtccagggcatccacctgcttgacggtaacgccagggcgcgccgccagcttgtcggtgttacgtgcgatggccaccacgttatgcccgcgacgcagggcttcttccagcagttggctaccggcccggccagtggccccaatgattgcgatcttgctcatgacgttctccagtacggttaaggtttgaaacggttcaccacttcatttcgcccttggcgactttggcgctcagttccagcgagccttcgtcgccgagggtcgggtaacgttttttcatggccgcgatcagggcggcggaatccttggccttggcggtttcggcgtcgaaggccttgatgtagtcagcggtaaatttcaccgattggacggacggcgtacccaggtagtgacccgggatcacggtgcgcggtttcaggttttcaatgcgttgcagggtggccagccagtctttgtgggattgcgcgctctgggtgtcggccatccacacatgaatgttttcggcgacgaccacgccaccgaccacggccttgagcgacgggatccacacaaaactgcggtccggctgcgcgccatccaggccgatcacctccagttgctggccttcgaggctcaggctgtggccttgaagtacctgcggcacgatggttttagacggcttgtccgcagccattttcgggccccagaactcaagcttgccggcgacggtggccttgatgtgatcgaccaccggttgcggcgccagcaccttggcgtcggggaaggcggtggtgagggtgtcaaggccgaagtagtagtccgggtcgccgtggctgatgtagatggtggtcaggtgtttgccgctggcgcggatcttctgcaccagttgctcggcctggcttttgccgaactgggcgtccaccaggatcgcatccttggcgccgctgaccagcaccgaggtgaccgggaagatcgcggcgtcgccagggttgtacacgtccagcttcagctcggcggcggccgcgtgggcggcgaaggccagggcggcggtggccagggtcaggcgcttgagggttgggaacatcgggcagctccagcatcggtaaaggatgcacagagcttagttgcacaaaaccagactaaaaatgcgatgctgggacatagtttgtttctgaaatcgggcaaatcatggaccgtctccaagcaatgcgtgtgtttgtcaccgtggtggacctgggcagtcagtccgccgccgccgatcatctggacctgtcgcgcccggtggtgtcgcgctacctggccgagctggaagactgggtcggcgcgcgcctgctgcaccgcaccacgcgcaagctcagccttacggcggccggcggcgaaaccctgccgcgctgccgacaattgctggaactgtgctgcgatatgcaagccgccgtcagcgagccggatgacgcgccccgtggcctgctgcgcctgagcgtgagcacctcgttcggccaggcgcaattggccgaggccatcgccgagtacgtcaagcgttacccgttggtgaccgtcgacctgcaaatgctcgaccgcacggtgaacctggtggatgagcgcattgacctggccatccgcaccagtaacgacctggaccccaatctcattgcgcgccgcctgaccctgtgtcgctcggtggtgtgcgcctcgccggcgtacctgctggcccatccggccccgcagaaagtcgaagacctggccgggcacaactgcctcacccattcctatttcggcaagagcctgtggcattttgaagagcagggtgagcacgtctcggtgcccatcaccggcaacatcacgtccaacgaggccagcaccttgttgcgtgtgacgctggccggggccggcgtgtcgatgctgcccacttaccaggccggtgattacatccgccggggtgaactggtgcgcctgctgcccgacgccgagccccggcagatgaacatctacgcggtgtatgcgtcgcgcaaacacatgccgtcggcgctgcgcagcctgttggattttctggtgctgaggtttccggaggagcctgcgtgggacgttggtctttaggacgacataaacctgttgaatgtcgtccgataatggcaactcgccctggttgacctatgctttaaacagcaccgtgtagatccgcagaggtctgtgccatgagcataaaaaccagaaagtacctgatgattgtcaccctgtgcgccatcgccagcgcgctttacgggaccgctgcctaccgtgttgaactgacccgcatgcagccgacttttgcgatcagctgccatcaggaccaatgcgtgccgcataccggcagtttcagtgcgctcaggtaaccggctgttcagccttgagttgctcacgaaacgccttgggtgagaacccgacccgtcggcggaacagccgcgagaaattggtcgggtcggaaaaacccagcacttccgacatttcattgatggtcatgctggtgtacgtcagcaggcgcttggcttccagcaattggcggtcgtgcatgatctgcagcgcgggctgcccacccaattcccgacaggtgccgttcaggtgtgagaccgagatgcccagcttgtgggccaagtcctcgatcttcgggtgttcgcggtaatgctgttccaccaattgggtaaagcggcggaagtattcacgccccctcggcgcccgtgggtggcgcttctggatggcctggcggctgatccataccagcaatacgctgaccagcgcgtgcatcatcatgtccctggccggttgttcgtcggcgtattcatcctgcaagcgggcgaactggttgttcaggtaatcactgtccttgcccgccgggtaactgcccagggactgaagaccgtccaccgtcgcccccagttgtgcctgcaggtggccgaccagcggtgccgcgagggtgaccacgtagccttcgacatcctcgggaaaccggaaaccgtgcacgcacagtgggggcaggacttgtagcgttgcttcgttcagcgtgctgcgctggccttcgatttccaactgtgcctggcctttatgcacatacaacaactggcacagatccgcgtgccggtggggctggatttcccactggtattcccgactgcgtcgagaaatggtttcgcagtgcaacaaatcgggggttggccattgctggttttccccgtaaagcttgaagaccggaatcgcggttttggtcatggtttcaatccgatacccaggagagtggtgcggtaatcgccccaattggcaaaaagcgcaggctttggctcagttttcaccttcttatgccggccactcaagtgaaaaatgtcagcaacaagaccaatgacaactctttcaccccatccgttcgggtggaacttgcgggttataagaataatgaaaacgctgaaaacccaagtcgccattatcggcgccggtccctccggactgttgctcggccaactgctgcacaatgccggtatccagaccctgatcctcgagcgccagagcgccgattacgtacaaggccgcatccgtgccggggtgctggaacaaggcatggtcgacctgttgcggcaggtgggcgtcagccagcgcatggacaacgaaggcctggtgcatgagggcttcgagttggcgctcaatggccagcttacccacatcgacctcaaggcgctgaccggcggccagacggtcatgatctacggccagaccgaagtcacccgcgacctgatggccgcccgtgctgccgcgggcgccatcaccctgtatgaagcccatgacgtgcaaccgcacgagctcaaaagtgatcggccctggctgaccttcaaacatcagggcgaagccttccgcctggagtgcgactacatcgccggttgcgatggctaccacggggttgcgcgccaatcgatcccggccgaatcactgaacgttttcgaacgggtctaccccttcggctggctgggtatcctcgccgatacgccgccggttcaccctgaactggtgtacgccaaacatccgcgtggcttcgccttgtgcagcatgcgatcgccgacacgcagccgttattacctgcaagtgccggtggaggaggcgcttgatgagtggtccgatgcgcgcttctgggacgaactgaaaacccgcctgcccagccaccttgcagccgacctggtgaccggcccgtcgatcgaaaaaagcatcgcgccgctgcgcagctttgtggtggagccgatgcagtacgggcgcctgtttctgctcggcgatgcggcgcatatcgtgccgcctaccggggccaagggcttgaacctggctgccagtgacgtgagtaccctgtatcggattctgctcaaggtctatggcgaggggcgggtggatttgctcgaacgctattccgccatctgcctgcggcgggtgtggaaggccgagcgcttttcctggtggatgacctcgatgctgcatcagtttcccgaggcggatggcttcagccagcgcatcgccgagagtgagctcgattacttcatccactccgaggccgggcgcaagaccatcgccgaaaattacgtcgggcttccttacgaagctatcgaatagcctgctatcgtatcgagcattcccgcgggccgccttttcccgcgggccctgctcgaaggtcttgccgtgacgcacctcaatcagcctgttccgccgctgcccgctgtgcgcagcatcctcgcctcactgatgatggcgatcttcctgggggccttggaccagaccattgtcgccgtgtccatgcccgcaatttccgcccggttccacgacgtcaacctgctggcctgggtcatctccggctacatggtggcgatgaccgtggcggtgccgatctacggcaagcttggcgacctgtacgggcgccggccgatgatgctgattggcatgggcctgttcaccctggcctcgctgttctgcggcatggcgcaaagcatggagcaactggtgctggcgcggatcctccagggcatcggcgccggcggcatgatctcggtgagccaggcgatcatcggcgacatcatcccgccccgcgaacgcgggcgctaccagggctatttcagcagcatgtacgcggtggccagcgtggccgggccggtactcggcggctacatgaccgagtacctgtcgtggcgctgggtgttcctgatcaacctgccactgggcgccggcgcctggtacgtggcgcatcgcaccctggtggggctgccggtgccgcagcgcaagccgatcatcgattacctcggcacgttgctgatgatcatcggcctcaccgctttgctgctgggcatcaccgaaatcggccagggccagcattggcgtagtgactcggtgctgggcttgctggcgtgtgcgctggtggcgttgacggtgtttgtctggcatgagcggcgtgcacgcgagccgttgttgccgatgcatctgttcgccaaccgcagcgcggtgttgtgctggtgcacgattttcttcaccagcttccaggcgatttccctgacggtgctgatgccgctgcgttatcaaacggtgaccggctcgggggccgacagcgcggccctgcacctgctgcccctggcgatgggcttgccaatgggcgcctattttgccgggcgcatgacctcggtgaccggccgttataaaccgatgatcctcagtggcgccttgctgagcccctttgcgattctcggcatggccttgagcgcgccccaggcggtggggctgacggcgatgttcatgttgctgtgcgggatcgccgccggcatgcaattccccacttcgctggtgggtacgcagaactcggtggaacaacgcgacatcggcgtcgccactagcaccaccaacctgttccgctccctcggcggagcagtcggggtagcgtgcatgtcggcgctgttgctggcgctgttgcaggactcgagcttcgcccacctggccagcggcgcgctggtggccgagggcagttccggcaatgtgctgctcgacggcctcaacgccgcccccggcccggcgcaggacgccctgcgcggggagctggctgtgaccttccggcatttgttgatggtgagtgcggcggtgtcgctgctggggctcgcggccgcaatcgcgatgcccaaccgggtgctgcgcggccgcgaagacaaggcacgctgagcgtgagtttcaagggctgtagtaacccaccgctaccatgaaatgcccggccttgcgcacatacgcgtgcttgttctcgaccttgtcggtcaccgggtttttccagcggtatttgtattcgccctggtcctgctcggccatcagcttcaggattggctcgcccaccggcttgccgtcggggtccttgatcttgctgaagtcggtgttgatcaggcgcaggttggtgccgtgcgccacatagcgctgggtatcgaggtcgaccacgaacacatagaggtcatcctgcaggaaaccgccttgcaacgaattgatggccttgagcgtgccggcttcatccttgagcagtgcgttcaccgccttgttgcgcagggccctggcctgttccggcgtggcccggggcaagtagtaacccaccgccaggatgcgttcgcccacgcgctgataaaacacatgcttgtgctcgaccttgccgtcgttccagttctgccagcggtaatcggcctgttggatgccctggccttcaggcaccgtcagcgcagccttgaatgactggcgcaactccggcccgagcacctcggatacatcgcgcccgatcaaggcggaggaggggccgccactggccagcagcacgccctgggtgtcgaccacgaagacatagcggtcgtggtcgacaaactcgccctggcgactgaacgcggcaaacgccttgtcgccattgctctggtagtacgccaaggctttttccagcagtgccttggcggcctgggcgtcctcatcctgagccgttgcggcgtgcacctggctgaaacacaacagcagcagccaggtgagtcgaagcagtgccttcattaccggtccctcgttcttgttggtgtgacaagagcgtagacggtcgtgggccactcagaagggtttggtcggcaggtacttgccatccagggtgatcaccgcgcgggagccgccgtccgggtcctcgactttcttgatgtccagcttgaagttgatcgcactgatgatgccgtcgccgaattgctcgtgcaccagggccttgagggtcgagccatagacctggagcatttcgtagaagcgatacatcgtcgggtccgtcggtataccgccggggaagctgccgcgcaggggcacgctttgcagcaggcggctggcgtcttggtccaggccgagtttgtcgcacaccacatcagcggcctccttgggcaacgggtgctggccgagcagggcggcggtgacgaacgccaggctcaggccggtgccgtcggtgaggtcctgccaggacaggttcttgcgcgccttgagctcgataacggtgtcggccagggccaggcgtggggtttgggcgaagtgggattgcaacatggtgtggtcctctggagttggaatagggtcaggccgcgtgaatctgatccagcagcgacacgaagccaccgctgcgttggtccagggcgtcgatggcgccggtctcgatgtcgtacacccagccatgcagggtcagccggccttgcccgagcgccagggcgaccgaagggtgggtcttgaggttggccagttgcgcgatcacgttttcgcgcaccaatgaactcaggcgggcggcgtccgaggcatgctcgcgggcggcgttgatcagcttggccgactcggcgtggcgcaaccagttggccacggccggcaggtggtccaggcatttgcaggtggagatcgcggtcatggcgccgcagtcggaatggccgcagatcacaatgtcgcgcacccccagcaccgccactgcgtattcgaccgtggctgacacaccacccggctccgggccgtaggacggcacgatattgccggcgttgcggatcacaaacagatcgccgggttcttgctgggtcagcagttcagggaccacccggctgtcggaacaggacacgaacaacgtgccggggttctgggtggtggccaggtgtctgaacaggtcgctgcgttggccgaaggcttctgactggaacttgcgaaagccgttgatgaggtcttgcatggggttctccttgcgtcgctgatggggcaaggatggaagttttcagctatagcgtccaagaccggcttattatggtttctataagtcatgcctatagttggaggcagtcgatgctgttgcgccatatccgatacctgctggccgtcgccgagcaccgcaatttcacccgcgctgccgaggcgctgcacgtgtcgcagccgaccttgtcgcaacagatcaaacagctggaagacaccctcggcgcgccgttgctggaccgctccgggcgtagcgtcagcctcaccgatgcgggtgctgcctatgtgcgctttgcgcgcctggccttgcaggacctgcaggcgggcacgcgggccatgcatgacgtacaggacttgagtcggggcagcctgcgcctggcgatgacgccgaccttcaccgcgtacctgatcggcccgttgctggcgcggttcaacgcccagtatccgggaatcaccctgagcatcgaagagttgacccaggaccgtatggaagccgcgctgaccgaggacctgctggatatcggcatcggttttactggcgagcatctgccggatatcgaatgcgaagggctgtttgccgaagcgttgagcctggtggtgggggctggccatccggggttagacggccggcggtggctggagcagccgatggtactgctcaacccaggcttcgcgacacggcgctacatcgatggctactgccgcgatcaagggttaaagccgctgattgcgatggaagccaactccatcagtgcgatcatcgaaatcgtgcgcaacacccacctggcaaccatcctgcccagtgcgattgcccaggcccagccgggtttgcgtgcggtcgccatcgaaccggcgttaccgcaacgcaccgtggcactgctcagccgccagggcgcctatcgcagcgccgcgtgccgggcctttgtcgcgttgatcaaggcgccgccagccactgattgacgatgccgtcgtacgccccggtggccacgctcaggtgcagccactggtcgacgtagctcttccacgccacgtcatcgcggggcagcaggaaggctttctcgctgtattgcatctgccgttcggggttgaccgcgcacagcccgggcttgagcttttgctggtaacgcgcttcgctggcgtcggtgatcatcacgtcggccttgccggccagcagttcgtcaaagatggtcacgttgtcgtgcaaacggatttgcgcctggcccagatgggcacgggcaaacacttcgttggtgccgcccgccggttcgatcacgcgcacattcggctggttgatctgctcgacactctggtaacgctgcacgtcggtacagcgcaccagggggatcttgccgtcgacgccgagggcctggctgaagaaggcttttttctggcgctccagggacaccgaaatgccgcccacggcgatgtcgcagcgctgggcgaggaagtccggcatcaggcttttccaggtggtaggcacccagtggatcttggcgttgaggctcttggccagggattcggccatggcgatgtcgatgccttcataagtgccgtcggcgcgcagcgaggtgtagggcttgtagtcaccggtggtgcacacggtgagcgtgccgcgttcgagcacctggtcaaggcgcgagggcgcggtgtcggccagggcgctggtggccaggccgagtacacacagggcgaaaagagctttcatgcggtcgagtccttggggcatggtcggggcggccattatttccagcgtggggcagggtggcaaggcacgataaatgtttagccaagttgcaaccaaactccgtcaaccctgaatttaaccgccctatgccggcgtgtgacgctggcagttatctctcgcactgtgatccccgcatggacggctcctccgacactcaccccgcgacactgccgtccgccctcgcgttctgggctttgttccactgccggcacgcccgcccaccagatagcgcattcctacgttgatccatcccctggatggcgtgcacctgtgcgcctgcctgacccctacgtatgagaatgcccatgagtgtttttgcctgcctgcaggaagcccagtctttcctcgaacaacacccggacatcgagatgttcgagctgtttatcctcgacaacaacggtgtgccacgcggcaagttgctgcaccgcgacgaactgctggcggtgtacgagagcgggcgccctttgcccagcaccatcctcggcctgaccatcaacggcgacgacgtggaaaactccgggctggtctgggaggtgggcgatatcgactgccgcgcctacccgatcagcggcagtctgcagcgcatgccgtggcggctgatccccaccgcggcggtgcaagtcagcatgcaccccaccgaaggcctgcccgccaccgtggccgaccccaggcatctgctggccaaggtgatcgacgggctcaaggccgacggttattacccggtgatggcggccgagctggagttctacctgctggaccagaaacccgacgccaatggccgcccgcaaccggcgcgtgatgtggacggcggtcggccgcgctcgacccaggtgtatggcctgcgcgagctggagcagatcgagccgttcctcgccgacctttacagtgcctgcaaactgcaaggcatcccggcgcgcaccgccatttccgaatacgcgcccggccaggtagagatcaccctggaacaccgcaccgacgccctgcaagccatggacgaagcggtgcgctacaaacgcctggtcaagggcgtggcgcataaacacgggatgaccgcctgcttcatggccaagccgttcgacgacctggccggcactggcatgcacatgcacgtgagcctggcggacgccgagggcaataacctgttcgccagcgaagccaccgatggcacgccgctgttgcgccaggcagtgggcggcatgctcagtaccttgctcgattcattgctgatgttctgccccaacgccaactcctaccgccgtttccagaccaacagctacgcaccactggccgccacctggggcgtggacaaccgcaccgtcagcctgcgggtgccgggcgggccggccaattcgcggcatatcgaacaccgtatctgcggtgccgacgccaatccctacctggccgctgccgcgatcctggccgggatccatcgcggcatccgtgagcaacgtgaccccggcgccccggtggaaggcaacggctatgcccaggccaagacgctgctgcccaccgactggctcaccaccctgcgcgcactggaggcttccagttgggcacgggaagcgtttggcagtgagttccttggcgtgtacctggcggtaaaacgcgccgaataccgccagttcatgggcgaggtcggggagcaagactggcggtggtatttgcatcaggcgtgatcgattgggtggcaatcacggtttcgacctttttttcacgttgcgctggttaagctgcgaatcaaggtcgttcactgccgttccacccatatgagcccgcgatgtcgccacacacgccttcctccatcgagattgaatacgccgagcgctgcggtcgtgagcacgccagggtctgcggcgacacgcgcccgcccgggctgacgcagcgcctggcggcctggcgcagtgagtggttggtgcgtcaggccttgaaggttgcgggtgagccgggcctgatcctcgacctggcctgcgggtcggggcgcttctggccggtgctggccgaacacgtcaaccgggttatcctggcgtcggacaactcccaggacatgctcgaccacgcgcttacccatcacgcggcggcgttgctcaagcgggtcaagacattccaggggtcggcgttttccatcggcttgtcggcgaatgcggtggactgcattttctgcctggaattgtttcgccatgtgcccagcagtgaagggcgccaggcgttgctgcgcgagtttcatcgggtcagccgcgactcggtgattgtctctgtgccttctcgtaccagcgttgaggacgagttccgccaggctggtttcaaggtcctgagtcatcacgagttcatgccgggctccaacgtgtggcgggtctacgttcttcgtaagagaggataactcccgcctgtcggactattcttcatctcctgtctgagttttcatggtcggctgtgcactgcggatgctcgctagcccctttcgcgatatatactgcgcgccattcttcaagggagagccgtgtggccatcgatattcactggatctgcgacaacgatagcctcggccagcattgcgccgaatggcagcagttgccattcgtcgccctcgacaccgaattcatgcgggtcgacaccttttaccccattgccgggctgatccagatcggtgatggcgtgcgcgcttacctgatcgatcccctgaccatcgacaactggcaacccctggctgcgctgctggagaacccggcggtgatcaaggtgctgcacgcctgcagcgaagacctcgaagtgttgctgcgcctgaccggcagcctgcccgcgccgttgttcgacacccaattggcggcggcttacctgaacctcggtttctccatgggctactcgcgcctggtgcaagccgtgctggacatcgagctgcccaagggcgagacccgttcggactggctgcagcggccattgtccgagacccaggtcagctacgccgccgaagacgcggtacacctggccgaggtttatacgcggctgcgtccgcgattgacggacgacaagtacgcctgggtcctggaagacggtgccgagctggtcgcgaacctgcgccgcgaagtcgacccgtacgaggtgtaccgcgacgccaagctggcgtggaaactgtcccgcgcccagctcgccgtgctgcgtgaactgtgtgcctggcgcgagcagcaagcccgcgtgcgtgacttgccgcgcaaccgcatcattcgtgaacactcgctgtggcccctggccaaatcccagccggacaacctcgccgccctgggcaagatcgaagacatgcacccgcgtaccgtgcgtcaggacggccagttcctgctggacctgatcaagcgtgccggcagcgtgcccatggaccaatggccgcccgccgttgccgagcctttgccggtggatgccgccgcactgatcaagcaactgcgcgctcttggccaggctgaggccgaacgcctggacatggcgccggaactgatgctgcgcaagaaaaccctcgaagccctggtcaagagtggctaccccgatgggccttaccaattgccagactcgctgcgtggctggcgccgcgagttgatgggccaggcgctgctcgacagcctggccaccgccggagaacagccttgaaacgtatttgctccatctaccgcagctccaaacgcaccggtatgtacctctatgtgctcaagagcgatgcccttgaacgtgtgcctgaagcgctgatcacgattttcggcaagccggcccacgcgttcgacctggtgctgacccccgagcgcaagctgcaacaggaagacatcgtgcaagtcctggaaaacctcgacaaacagggctaccacctgcaaatgccgccggccgaggacgagtacatcgaacacttgcccgaagagctgttgcgccgcaacgacccgatgtgatcgaccggtgccccatccggggcactcgcttcaatggaatcgtataagtgggcggtggccgtaaggatgcgggcggccgtccgtagtgtttttgaaaggttttatgcatgcgcgttctgattgctgaacaggatcacccgctctacgcccaattgctcggcgaagcggcaccggaccttgaagtgctgaccagcggcgactcggccgaactgtcgcgcctggccgccgattgcccggtatggctgggccagccggacctgttggccacattgttgcgccagggtcaccacccgcaatggctgcaatcgacctgggcaggtatcaccccgttgctcgccgagggcctgccgcgtgattatcgattgacccgtgccgtgggtatttttggccaggtcatggctgaattcgtgctcacctacatgctcggccacgagcgcgaagtgctggcccgcctggtcagccaggtcgagcgtaaatgggacaatcgcatgggccagagcctggcgggacgcaaggcgttgatcgtcggcaccggcgatattggccagagtgttgctgagtttctcgtgccgtttggcgtgaagctgtacggcatcgccagttccgcacgcgagcaggcgccgtttatcgaagtggccgggctcgaccagttgggccggctggtgggcgaggtggactacgtgatcaacctgctgcccaacacgccgagtacccacgatctctacgacgcggggctgttcaagcaattcaagccaaccgggctgttcatcaacgtcgggcgcggcgtggcggtggtggatgccgacctggtcgaagcgctgaaagaagggcacctggccggtgcggtgatcgacgtgtgccgccaggagccgctgccgcaacgtcatccgttctggacagcttgggggttgctgctgaccgggcacagctccgcgccgacttcgccggcattgatggtggagttgtttgtgcaaaacctgcgggcgtatcaggccgggcaagacttgcgcgggaacgtggatttcgagcgcggttactgacagcagaggagccggcatgccggctcctcttggcattacaggctgaagtcaccttccgacaccagctcgctcagtggcttgcgcgggctcggtgcttcacggccttgcaggtactccggcaggctcgatttgtcccccagcttgccgaccgccacggcggcatgcagcgcataaccttccgggatcttcagctctttgcgggtcagttcttgatcgaagccggccatgccgtgggtgtgccaaccgctgaggctggcttgcagcgccaggtggccccaggcggagccggtatcgaaggtgtgccacagcgccggggtttcttccgtggcgccgggggcggtgaagtcggttttcgaggcgatgatcaccagggccgacgcatgttgtgcccagccacggttgaattcattcagcaaacccaggaagcgctcccagtccggcgtgtcgcggcgtgcgtagagaaagcgccagggttgcgagttgtaggccgagggtgcccagcgtgcggcttcgaagaaactcagcagggtttccttggagatgctctcgccggtgaaggcgcgaggcgaccagcggtcggtgaactgggtgtggatcggatagtcggcaacacgtgtcatggagcagttcctgatcgtcaattcggccctcaaagctactgtgcagtcactagactgacaagtgttgtgacaccgccagtcgtaagcgcttggatcccgcagccgtgggcactagactggcggccttttcacctaccgatactgatgtagagccatggccgccaaagtcgaacctttctggatacgcaaaaccctcgaacacctcgaccaggaggaatgggagtcgttgtgcgacggctgcggcctgtgctgcttgcaaaagcttgaagatgaagacgacaacagcgtctattacacgcgtatcgcctgcaaactgctcgacctcaagacctgccagtgcaccgactaccccaaccgccgtgcgtcggtgcccgattgcatccagctcaccccgggccaggccgaccagttcaaatggctgccgcccacctgcggctatcgcctggtcagcgagcgcaaggacctgccgttgtggcaccacctggtctgcggcgaccgcgatgccgtgcatcatgaacgcatttcccagtccgggcgcatgctcagcgaaggcagcgtgcccgaggacgactgggaggattacctgattttccgcgcgggctgaaaggggagtgtgtatgagggtcggaaccaagctggcggcaagcctggtgttgttggcactgagtcagcctgggtggtgcgcgaagaaagtcgacctggattatcacgtcaaactgctgccccagagcgatcaggccgaggtacgcctgagcctgtcccagggctcggcggtgcgcagcctgaacttcgacctgggccgcgacggtgactacagcgacttcaaggccgacggccagtggagcgtcaaggagcaccgtgggctgtggcaacccagcgccgacaaggccagcctgacctaccgcgtacgcctcacccacgcgcgcaaaccgggtatctatgaagcgcggatgacacccggctgggcgctgtttcgcggcgaagacctagtgccgacggcgcggctcgaccagcaggacggcgtcgagttggtctcgcgcctggtgttcgaactgccggccggctggaaaagcgtcgaaaccgcctggccgcgcatcggcaagaacaagtttcgcatcgacaacgtgtcccgcctgttcgaccggcccaccggctggatgctcgccggcaacctcggcagccgccgggtgcgcctgggcgaaaccgaagtcaccgtggcttcgcccaagggccaggccatgcgccgtatggatgtgctgacgttgctgaccttcgtctggccgcaggtggaaacggcgttcccgcgtcacccggccaagctgctggtggtcggcgccagcgacccgatgcgtcgtggtgcgttttcggcgcatgactcgatctacctcaacagccgcacgccgctggtcagcgaaaacggcggcagcccgctgattcgtgaagtggtgcaggcggtagggcgtttcaacgatcacgacaccagtgattggatcagcgagggcttgggcgagtattacgccatcgagctgctgcgccgcgccggcggcatcaccgatgagcgttaccaggcgatacaggcgcgcttggcgaaggaaggcaaggacgtgaccagcctgcgtggcgagcacgtcagcggcgcgacagtgtcacgggcggtggtgctgctgcaggaactggatcgcgagatccgcgtgaagactcataacaagcggtcgctggatgacctgacgcaagcggtgatgcgggccagccgcatcaccacggcggagtttgtgcagttggctgaaagcatcatcggcgagtcgtcggtggtgctggacagtaagctgctacgttagacgctggttttggtggccttctcggccgccacttcagccttggtcttcaagttctttagctccgcgccggcccgctcgattttcgtacgtaccgtgttcatttcctggcggccctgttccagcttgtccttgagcgagctgtgcccggtaaagccacgggccagcgccacaccgccgatcgccacctggatcaaaccgaaaatcccgcctcggcgcaggcctttgccgaccatcatcacgccacccgccaccgagccgatgcgctcccaaccgtgcacgttctgctttggctgagtctcgaagggggtgtgttcgatgataggtcgcaaggttttgctgtcgctcatgatctgtctccaacaagggctattgataagtagctgactgcccgcagacgccggatgttcccgaaatatcagtacttgggacccgaacgggtgttgttgcccttggccaggcggtcgtagagcaccacgttgacggtggctgcaaggttcatgcaaccagtggtcgggatgtagaccacgtcttcgcaccagtcgcggatctctttatccagcgaaccgtcttcggggccgaaaatgtacagcgcacggtcggggtgggtgtactcaggcagcgggcgggcgccttccaccagctccacggcgacggggatgcaacccaggggcaggatttttttcaggtcatcgatgccgatcagcggaatgtcgtggtggaccttcttggtgtcggtgatgaagtcccgggcgcgctcgtagcgcacgccggtgtagaacaccgaggccacgccgtagcaaccggcggcgcgcatgaccgaaccgacgttttcgggggatttggggttatacagaccgatgcagctgtagcgtttattgcccacggggaagggtgccttggagaaaaacggcgattatacggccttggggggatgtgttgcttggacgatcgccatcgggggcaagccccctcccacaccaggcctgcgtacgcaggtcagaatgtgggagggggcttgcccccgatgagtccggtgctaacaacaatggactatcagtcgtctttcttcatcaaccccgccaacgccgcaaacgggttatgcgtggccttggcaattgtcgggctgctggtggagccttcgccgaagtactgctggtcggtgtagcgcgagtgttcgttatcgtggcagtacaggcacagcaattcccagttggaaccgtcctggggattgtcatcatgattgtggttacggtggtgtactgtcagttcactcaggcgtttgccggagaactcacgggcgcagcggccgcacacgtgggggtacattttcaaggctttgtcgcggtagcccatttcccggtcgcgctgggcatcggcaaggatgcggtccagcttggcggtgtgggagggcgggttggtcgagctcatcatggctcctggctatttggtggttcacggatagtgttgattctagccgctcgcgacgtaaataaccgcttcactttactcataaggatctgaaacgcatgcgtctgcattcatggactgttgcactgttgttgtgtggggtagttgcccacgcccaagcgttctccacgccaaaacccgggcaggtgatcgaggtggccctcgaacaactgcacccgacccaggctgtggtgggctttgaccagatttactacagcctgggcctgttcgccgacaaacccgccaaggtcttcgatgaatactgcgagaccaacggccagggcgaggctgacaacgtgcccaagggcgcggacctgcaccagccgtccagcttcacctgccaggacccggtcggtacccatcccgacgaaatgaaaaccgtggtggtcggccccggcggccagctctacctgaccgacggtcaccacagcttcaccaccttgtgggaggtgccgggcggcggcccccgcttgaagatgtgggtcaaggtcaccgatgacttcagcaacagcccggacatgcagagcttctggcagcacatgcaagcggcgcgcaaggtctggctcaaggacaagcagggccagaccctgccacccgagcagttgccggcacacctgggcttcaagaacctgcaggacgacacgttccgcagcctggtgtatttcacccgcaaggccgcctatggcaagccggacgcgggagaggtcgcaccggagttcctggagttctactggggcaattggctgcgcactcaaattgacctgggcaagtacaacctgaacaagaagggcggttacaaggacgccattgaagccgtcgccaagcgtatggtcagcctggcgccgggttcacaggtgggcgatagcgggtttactgcccatcagctgggaggcatgacaaagctcgaccgtaacgagctggaaaagactttcgacaaaaaagtgccgtacgtgatcgattaccgcaattccctgcgctagccgatcacgccttctgtgcaatccagatggtatgccgcgtgcccttgttaccatgggcaaacacctgcacttcctcggccttgaaaccggccttgcgcagtttgtcgctgaacagcttgtccgcgctggccgaccacacggccagcacgcctttcgggcgcagggccttggcacaggcggccaggcctccggcggagtaaagccagctgttggccttttgcgtgaggccttcggggccgttgtccacgtcgagcatgatcgcgtcaaagccctgaggttcggcctgcagcaccttggccacatcctccaggcggatcaccgtgcgcgggtccagcaatggccggccggatttttcccccagcggcccacggttccactccacgacacccggcaccagttctgcgacgaccacctcggcggtcttgcccaggtgtttgagcgccgaggccaaggtgaaccccatgcccaggccaccgatcaacacccgcgaatccgcacgaccggcaactctgcggcagggaatttccgccagcgcatcctcggaaccgtgcatgcgcgtgttcatcaattggccgccgtcaccgccctggatcttgatgacaaaatcttcaccgtattcgaacaggcacaaggcaccgccattgtcggggatcggggtggtgtccagcagaacgaaacgtttcatggaaatctcattgggaagggcattcttgcgcggttgggagtagccttgtgacattccggtcaggccatggagccatcgatgaagtgcagcattctaacggtcattgtgttgagcgcgctcgcattgggtgcggcgcaggctcaggagttgcaaaccgtaccggtcgcgcccgccccgacgccaggcgcgccgggcaccccgacgccgacgttgtacccgcaagtcaccccgccggcggtgcccaagaccaacggctcgccaccgttggtgcccatcgtgctgccgacgccgccgaaggaccagacggtgcctggcctgctgcagaacgacggcaagccgaagtcgccgggcggttaaaactgctgggacagtaactgcccatccgccatgcgcaggcgcttggacagggcgatggcaatcgcgcggatgatcttggcggcaaccctgggcgcttcgttgagcatcttttccagggagtcccggcccaggttcagcagcacacagtcgctggccgccacgcagctggcggaacgccgctcgccgtcgagcaccgccatttcgccaaaggcccggccactgcgcagggtggcgatggtcaggcgctggccgtcatgattggttttctgcaccgccacctggccactgtggaggatgcacatgaaggtgccggcgtcgccttcgaggaaaatcacctcgtcacaggcaatgctgctgatgttgaagtaaccggcggcgacgtgaaaatcttccggcaacagcgggtcgaacaggccgcaatccatgagcatgtcgcggatttcggtattcattaaggtcggtagtgccatggctgcaagcttgatccatcaatcagtaggcggtcctgtgttcagacaggaccgcccggctaagttccttaaaccagccccagcgccttgaacacaaatccatattcgagcgctacgtcacgtaatccctggtaacgaccgctcataccaccgtggccggcgcccagttcggtcttgagcaacagcaggttgtcgtcggtcttggtgtcgcgcaacttggccacccatttggccgcttcccaatactgcacgcggctgtcgttgtagccggcaatcaccagcaggtgcgggtaggcctgggcgctgacgttttcgtacggcgcataggccttgatgcgctcgtacacttcgggttcttgcgggttgccccactcgtcatactcggtgatggtcaatggcagctcggggtcgagcatggtgttgagcacgtcgacgaacggcacttcggcaatcgccgcctggaacagcgccgggcgctggttgagcaccgcaccgatcaacaggccgccggcgctgccgccgctgatcaccagttgcctggacgtcgtcaggccctcggcgatcaagtgttcggcacaggcgataaagtcgctgaaggtgttctgcttgtgctcctgcttgccgttgcgataccaggcctcacccagctcgccgccgccgcgcacatgcgcaatggcaaacgccacgccccggtccagcaggctcaggcgggcgtgggagaaccaggggtcgaggctcgaaccgtaggcgccgtagccgtacaggtacagcggtgtcggcttgccgagctggtcgcgcttgaccaccaggctgatcggcacctgggtgccgtccgccgaggtggcccacaggcgctggctcacgtagtcgtcggcattgaacacgccgagcaccggagtttccttgagcacctgttgcgtgccgctggccagttccagttggcgcacctgggccgggcggttcagggcttcgtagcgcaggcggatcctattgctggcaaattccaggctgttttgtacgtagaggctgtaggcggcgtcgggcaattccacgcgatacaccggcaggccttccgggtgcacctcgatcaccggcaggccgccgatgcgcaggctcagggtcatggcgctggtgttgaggctgatgccgtcgagcatcacttcgtcgttgtgggggatcagggtctgccattcgccttcggtcggcacatcgccaatgtcggtggccacgaacagcgcgtagttgatgccatcgcggttgctgcggataaaccaggtccacgcgccattcagctgaccgtgatcgacatcgtattcatggtcctcgacccgtggcgccaggcaggtgaaatccaggtgcggctgttcggcatccagcgcccagacttcgctggtggtcttgctgcccagcgacagcagcaactggcgctcggagctggagcggtagcaatgcaggaagaaacggccatcgggctcgtggaacacttcctgcgccgccgtgccatccaggcgatagcgatacaacttgtgcgggcggtgcgtgtcgtccagttcgccgaagaacagcgtcaggctgtcattggcccaggtcatgctgccgtcgcagtcttcaaacgccagttcgctgaccttgccggtggccaattccttcacgtacagggtgtagatctcttcgccactggtatcgaggctgtaggccaggcgctggtggtcggggctgatgctgaacgcgccgagggagaagaaaccgccattggccagcacgttggggtccagcaacagttcttcgctgctgtcgtccacctggttgctgtcatcggccgggcggcggcagcggtaatggcgggcgtactcgtcaccggcggtggtgcgcgtgtaatacaagtacggcccccacggcgagggcagggacaggtcggtttcgagaatgcggcccttgatctcttcgaacaggctgtcgcgcagcgccttctggtcggcgagttgcgcttcctgccaggcattttcggccttgaggtaatcgagcacctcggcgctgtcgcgctcttgcagccaggcatacggatcggggccttgggccttgcgggcaatcggagcagtcgatacaggcataggattgatctctatctggcagacggtggcaggcattgcagccgcgacacgcaaaagccgttatcatagccgcctgtttgccaaccttgccatggacaccatgaccgagaacgactatctgaccgcttggggcctttacgccttcgccgctttgggctgcctgctggtgtggtggcgcatgacccgctggatctggcgctggcttcgcgagccgctgcaattgctgatggcggtgctgctgttgagcccgaccatcgtcgatccggtcaagacccagttcgcgccggcggtggccatcaccgccctggacctggtgctcaaggtcggcaacaacgcctggcgggccatttccgatctgttcatgtacagcatgatcgcctttggcgtgtacctcgtgtttgtgctgatccgctggccgatcgagcgcgccgccaaggcccgccgcgagcgcaaggccgccgccgatgcggccctggccgccgagccggatcaagatgaagacgacgtgcccttccgccgtcctgcacccgtgagcggtatgcgcgtcgaaccgcgcctttaacgtcgtccgccctgcagcgagagccctggcatgtgtgaattattgggcatgagtgccaacgtccccaccgacatcgtgttcagctttaccgggctgatgcagcgcggtgggcgcaccggcccccaccgtgacggttggggcattgcgttctacgaaggccgtggcctgcgtctgttccaggacccggccgccagcagtgagtcggaagttgcgctgctggtgcagcgttacccgatcaagagcgaagtggtcatcggccatatccgccaggccaatgtcggcaaggtcagcctggccaatacccacccgttcgtgcgcgaactgtggggccgcaactggtgcttcgcccacaacggccagttggcggatttcaacccccgcgccacgttctaccggccggtgggcgacaccgacagcgaagcggccttttgcgacctgctcaatcgcgtgcgcgaagccttccctgaaccggtggaccttgaaaaggtgctgccggacctgatcgccgcctgtaccgaataccgcagcaaaggtgtgttcaactgcctgctcagcgatggcgactggctgttctgctattgctcgaccaaattggcgcagatcacccgccgcgcaccgttcggcccggctcgcctgaaagatgtcgacgtgatcgtcgattttcaggccgaaaccacccccaatgacgtggtgacggtgatcgccaccgagccgttgaccgacaatgaaaactggacccgctacgaaccgggccaatggagcctgtggcgacgcggtgaatgcgtcagccagggtatcaccgagtaaggatatcgcccatgttgctcagttatctgcggttggtgctgtttgcgattggcctgctggtcggcgtgcaggtgccggggtttatcaatgactatgccaagcgtgtcgaagcgcacctgatcgaggcccagaccggcctcagcgggtttgaaaacaccgcacgccagttcttcaacggcgatttgaaagccttggtggcgcattaccgcgccagtgatgacccggtgttccagagcgacgccaacagcctgggcgccatgcttgatcgccaggtggcgttggacaagcaattccaggccatgcaaggcccttggtatatccgggccctgcaagtggcggtggcggctgacccggatatccgcctggaaacctggaacggctacagctaccagatcctgttgacgcctgaggccatgggctggggattgggcggggcaatgctgctgtcgtttggcctggaatgcctgttccgtctgatcgactgggtggtgctgggcggcaagcgcctgcgccagagtcgaccgatcgaagagcgcgacctcaagggcctctgagacaaactgtgggagggggttgcccccgatggcggtggatcagtcactgatgcattgactgacaccctgctatcgggggcaagccccctcccacagttttaatcctttgtcttcaatgaggttgtgtgctcagtagcatgcgctctacgccaacctcttcggcataccgcgccaccaccttctggcacaaccccacaatttcttccaccaactccacccccacgcgccacgacaccaccacctgcagattcggcagtttctgcgccatcggcaacatcaccaactccccgcgcgccagttcttcgctgaccaataccggcggcaacgcgccgatgccgaacccgtcgcgtaacaggcgggtaatggccgacaccgaattcacgcagttcatgcgtggcgcggccacgccgttggcttgcatcaggctgataacgtcctggtgcggatgggagtttttcgagtaggtgatgatgcgctcccgggccagttcggcgagggaggcgtagtcgcggttgtagatcgactggctggcgacgatccaggccatggggtggctggccagttccaggctgcgtacggtttcgaggcgcagcaggtcggtttgcaggatcaggtcgaggaagcctttttgcagctgatcgctgaggttcagtgcagtatcggctaccaattcgatttccacgagggggaagtggtccatcaattccgccaccaacgggctgagccaggtgtgaatcaccgtgtccatggcgccgatccggatgcgcccgaccttgctgctggtggtttccagggactgcttcaaaccctgcatggtcaccatcatctgctcggcgtaatccagcaccttcaagccttccggggtcaggctcacgccacgcgaatctcgcagaaacaacttcacgcccagctcgctttccagcaccgcgatgcggctggagattgatgcctgggtggtgaacagcttctcggcggtcaggcgaaaactcttgagcttggccacccagacgaaggtttcgaggaacttcaaattcatgggatcaactttttcttatgcatggatcggtttttattagttggacgcggcaccgggccagcgccaaaaatcgagccattccacgataagcgccgttggggtgtcaggacaagttgcgaattctgcgtaaaaaatcccacactacaaaaaaacaaagcctacaggagcgacagtccgtgagccgtcttctactcaattgcgacatcggcgaaagctttggcaactggaccatgggtctggatgcggaagtcatgccgttcatcgattgcgccaatgtggcctgcggtttccatgccggtgacccgagcatcatgcgcaagaccgtcagcctggcgctcaagcatggcgtgcaagtcggtgcgcacccggcgtaccaggacctgcaaggcttcggccgccgctccatggcttacaccccgcaggaaatccaggacctgctgcactatcagattggtgcgctcgagggtatctgccgtgcccagggcggacgggtcagctacgtcaaaccccacggcgcgatgtacaacgacatgatggccaaccctgtgcaattgcgcgcggtgatccaggccgtggcggcctacagtgaactgccgctgatgctgctcgccacccgcgacaacagcgctgcccaggcgctgggcgatgagtacggcgtcaccctgtggtttgaagccttcgccgaccgcgcctacgacaacaacgggcacctggtgtcgcggcagttgccaggcgccgtgcaccatgattccgacactatcgtgcaacaagccctgaccatttcccgtggtgaagctttaattgccagcgacggcagcccgctggtcctgcaagccaataccctgtgcgtacacggtgacaacgccagctcggtcgcggccgtgcagcgcattcgcgaggcattgaagccagcatgaagccacggattgaagtggtcgccatcgactgcctgatggtgcgtctgtttgatgcaatcgccgagaccaacatgccgtggatgctcgccgctacccagcgcctgcgcagcgggtttggcgcggcactggtggacctggtgccgtcctacaccaccttgatggtgcattacgatctcgttgcggtgaacccggcccaggcgcgggaactgatcgaccaggccctcaccgacctgcagccgcaggcccagggtggcggccagtgccatgtgctgcctgtttggtacgacctgagtgtcggcccggaattgaccttgctcagccagcgcagcggcttggcgatcgacgaagtgattcgccgccacagtgcccacgaataccaggtgtttgccctcggcttcgcgcccggctttgcctttatgggcctggtggatgaaatcctcgccacccctcgcctcagtaccccgcgcaaacgcgtggcggccggcagcgtcggcatcgccgaacggcaaaccgccgcctacccggtggtgtcgccgggcggctggaacctgatcggccgcacgccggccaggctcttcgaccgcgagcgcgacggctacagcctgatgcagcccggcgacacggtgcgtttcgaggcggtcgagcgtgctgaattcatcaagctgggtggcgatgacacgccgttggagtcgcaggcatgagccgcttattgatcgaggccagcacgccgctgtgcctgttgcaggacgccggtcgctttggcgtgcgccacctgggcgtgacccagggcggggcgctggactgggtgtcgatgtcctgggccaactggctgctgggcaatgccctggacgcgccggtggtggaaatcaccctgggcggtttcaccgtgcaggccgaggactattgcctgctggccctggccggtgcggacctgggcgcgtctatcgacgaacgtgccatcagccctggacgcagttttatcctgcaaaagggccagcgtttgcgctttacccagccgttcagcggtgcgcgggcctaccttgcggcaccgggcggctttgacgcgccggatgtgctcggcagttgcgccacggttgtacgtgaggaattgggcggggtggacggttttggcagggcgttggccgaaggcgggcgcctcgtttattcgggggcgggcggggccatgaaggtactgagtgaaccccaattgccaaccggcgcatcactggatgtcatcctcggcgcccagatcggccagttcagcggccaaagcctgttcgatgccttcaacagcgattggtccctggacagccgcgccgaccgcatgggcatgcgtttgttgggtacacctttgcagtaccaggggccgtcgctgatttccgagggcattcccctgggcgcgatccaggtgccgccggacgggcagccgattgtgttgctcaatgatcggcagaccatcggcggctatccacgcctcggggcactgacgccgttgtcgctggcgcggctggcgcagtgcttgccgggggagacggtgcgcttggcgccggtggtgcaggagacggcgcaccagcagcacatcgactatttgcgccgatttacgtaacaccgcatttagaaggtgggagggggcttgcccccgatagcagtgtctcagtcaatacatcagtgactggaccaccgccatcgggggcaagccccctcccacattggatctcctacagtattgggggcggcgtttatttggagagaaaccgcatgccttcttccagcccgcgcagcgtcagcgggtacatctgatcctccaccaactcccgcacaatccccgtcgacgccgtatacccccacgtgtccttcggatacgggttaatccagatcagctttttgtacttggccatgaagcgctgcatccacacatacccaggctcctcgttccagtgctcgacgctgccgccggcctgggtgatctcgtacggtgccatcgacgcatcgccgataaagatcactttgtaatcggctccgtatttgtgcagcaaatcctgggtcgaggtgcgttccgaggtgcggcgctggttgttcttccacaccgattcgtacacgaagttgtgaaagtagaagtactccaggtgcttgaactcggtcttgcacgcggagaacagctcttcgcagatcttcacgtgggcgtccatcgagccgccgatgtcgaacagcaacagcagcttgatggtgttgcgccgctccgggcgcatctggatattcagcaagccggcgtcgcgggcggtgtggtcgatggtgccgtcgatgtccagctcttccgccgcaccctggcgcgcaaacttgcgcaggcggcgcagggcgaccttgatgttgcgcgtgcccagttccacctgatcgtcgaggttcttgtactcgcgctggtcccacacttttacagccttgccctggcgcttgccggcatcaccgacacgaatgccttccgggttatagccgccggagccaaacgggctggtgccaccggtgccgatccacttgttgccgccggcgtggcgttctttctgttcttccaggcgcttcttgaattcctcgatcagcttgtcgaggccgccgagggattggatctgcgcgcgctcctcatcggtcagcgaacgttcgaactctttgcgcagccactcttcgggaatcaacgcctgcaagtggtcgtcgagcttctccaggccgttgaaataagcaccgaaggcccggtcgaacttgtcgaaatgccgctcgtccttgaccaggatcgcccgcgccaggtagtagaactcgtccatgtcggcgaaggtcacgcgctgtttcagcgcgttgatcaggtcgagcaactcgcgcaccgataccggcaccttggcggcgcgcatctcgttgaacaggttgagcaacatcagcgattaccgcgacggctcatgaacgccagacgctccagcaactgcacgtcttgctcgttcttcaccaacgcaccggccagcggcgggatggccttggtcgggtcgcgctcgcgcagcaccgcttcgccgatgttgtcggccatcagcagtttgagccagtccaccagttcggaggtggacggttttttcttcaggccgggcactttgcgcacgtcgaagaacacgtccaacgcttcgctgaccaggtctttcttgatgtcggggtagtgcacatccacgatcttttgcagggtggcgcggtcggggaaggcgatgtagtggaagaagcagcggcgcaggaatgcgtccggcagctctttttcgttgttagaggtaatgatgatgatcgggcgtttcttggccttgatggtctcgtcgatttcgtagacgtagaactccatcttgtcgagttcttgcagcaggtcgttggggaactcgatatcggccttgtcgatttcgtcgatcagcaggattacccgctcttcggactcgaacgcttcccagagcttgcccttcttcaggtagttgcgcacgtcgtgcaccttgtccacacccagttgcgagtcgcgcaggcggctcaccgcgtcgtactcgtacaggccctggtgggccttggtagtggacttgatgtgccaggtgatcagcctggcgccgaaggactcggccaattgctcggcgagcatggtcttgccggtgcccggttcgcccttgaccagcagcggccgttccagggtgatggcagcgttgacggccagtttcaggtcatcggtagccacataggcctgggtgccttcgaacttcatcggtgtttcctcgcattcatcaatgccgggactataccgcgcagccccggcgactgtgaacgcaggtgggttattcagtctctgaatgaccggtcacattcaatccgccgagggcttgggttgttcgtaccgcgcattgaacgcctggataaagccgttgcgtaaaatcgccaaaaacgcggagaacgcgctgacattctgctggtgcacgctgccactgagttcgacgcgggtcgcgaactggtttttgctctggtttttcagcacggtttcgctggcaccgaccacggcttcccagatcgagcggaagatgttcttgtctttgttttccacgtcctgctgccagtcgaacacttcgacatcgcgcagcaacggcttgatataaccagtcaattggcctttgtccgcctgggcttcgattaccacatcaccggtgccggccttgaagtcgaacttgccgtaagccgaggcgaagtcattcatgcgcttgagttgcaggtctttggcgcggaagcggaactcgaagttttcgaaattgctcagcgggtcgaaggtggcgctggcttccaggggcgcctggccctggagcagggccttgccgtcgaagcgggcgtcgcgcttgccttggacgtcgacgatgttggtcaggttgtagaagctggcgttgaccgaggttgcattcaggttgaccggtggtttggagctgaagttgtggaaggcgatcttgccgtcttcgatgcgcacttcatcgagtgtgatgggcgccagcttgctcaactgctcgcgccagtcggtgcctttaccggtctgggacgcctgcttgttggcgccgccgtcgacgaaattcacctcggggttgatgaacagcaccttggccaccaccgcatggtcgtaccacagcgagtgccagctcaccgccaggtcgatcagcggcgccttgacgaacggtaccggcaccttgccgtcgaccttgatgatctgcaggccgttgatcctgtaggcgccgcgccacagggccaggtcgacgtcggtgacctggccacggtagtcgcccatgtcggcgagcttgttattcaggtagttgcgcaccagatagggcagggcaatgctcagggcgaccagtaccaccagcaatccggcaacggtccatagtggccagctgtagcgacgtttcatggggagggtcctctgtccgtatggggagtggactgttgcgatgggcgcaacgttcctccgactggacgcttggcggcacgaggcatacccttgttgccttcctgaataccgccaataggacccgtcatgagccgcatctttgcagacaacgcgcactccatcggtaatacgcccctggtgcagatcaaccggatcgcgccgcgtggcgtgaccatcctggccaagatcgaagggcgtaacccaggctactcggtgaagtgccgcatcggcgccaacatgatctgggacgcggaaagcaccggcaaactcaagccgggcatgaccattgtggaaccgacttcgggcaacactgggattggcctggcgtttgtcgccgctgcccgtggctacaagctgctgctgaccatgccggcgtccatgagcatcgagcggcgcaaggtactcaaggccctcggcgctgagttggtgctgactgaaccggccaagggcatgaagggcgctatcgaaaaagccggcgaaatcgtcgccagcgatccggccacttacttcatgccagcccagttcgaaaacccggccaacccggccatccacgagaaaaccaccggtccggaaatctggaacgacaccgatggcgccgtggacgtgctggtggcgggggtgggcaccgggggcaccatcaccggcgtatcgcgctatatcaagaacatcgcgggcaagccgatcctgtcggtggccgtcgagccgatcgtgtcgccggtgatcacacaggccctggccggtgaagagatcaagcccagcccgcacaagatccagggcattggcgccggtttcgtgccgaagaacctcgacctggcgatggtcgaccgcgtggaactggtgaccgacgacgaatccaaggccatggcccttcgcctgatgcaagaagaggggatactgtgcggtatttcctgcggcgcggcgatggccgtggccgtgcgcctggccgagaaaccggaaatgcagggcaagaccatcgtggtgattttgccggactccggtgagcgctacctgtcgagcatgctgttcagcgatttgtttaccgagcaggaaaaccaggcttgatgtatgtcagcgccaataccttgggccttctgcatactggcccaagtgtttatcatggccggctgctacgtctgctgttggccaggcgcttatttccaggagttgctgcatgaccttttctttggccgccaagctgtcggtgctggcgttgtttatcggcagcacgctgtacgtgcatctgcgcggcaaggcgcgtttgccgatgttgcgtcagttcgtcaaccattcggcgctgttcgccccgtataacgccttgatgtacctgttctcggccgtgccgtccaagccctacctggaccgcagcaagttcccggaactggacgtgctcaaggacaattgggaagtgatccgcgaagaggccatgcacctgttcgacgagggttatatccgcgccgccgaaaagaacaacgacgccggtttcggttcgttcttcaagaaaggctggaagcgtttctacctcaagtggtacgacaaaccgctgccatcggccgaggcgctgtgcccgaaaaccgtggccttggtaagcagcatccctaacgtgaaaggcgcgatgttcgcgttgttgccgggcggtagccacctcaacccgcaccgcgacccgtttgccggttccctgcgttaccacctgggcctgtccacgccgaactccgacgactgccgcatcttcgtcgacggccaggtctacgcctggcgcgacggtgaagacgtgatgttcgatgagacctacgtgcactgggtcaagaacgaaaccgaacagacccgcgtgatcctgttctgcgacatcgagcgccccctgagcaaccgtctgatgacccgcgtcaaccgctgggtcagcaagcaattgggccgcgcgactgcgccgcagaacctcgatgacgagcgcgtcggcgggatcaaccaggcgtatgcctggagcaagaccttcagtgacaagttcagcggtgtggtcaagcagtggaagcgcaagcatccgaaggcttaccgcattgcgcggccggtgttggcggttgtcgtattggtcctgctgtggaaatggctgttcggctgatttgcaactgttagcacggtcaaaatgtgggagggggcttgcccccgatagcggtggatcaggcaaaaatgcttagcctgacacgctgccatcgggggcaagccccctcccacatttgatcacctttgatctttagctggcgatcaactggcgcagcacatagtgcaggatgccacccgacttgaagtactccacttcattcaacgtatcgatccggcacaacacgtcaaccttctccgtactgccatcctcccgcgtaatcaccagcgtcaggttcatgcgcggcacgatctccacatcgctcagcccgagaatgtcgattttctccttgccggtcagcttgagcgacttgcggttctggtccagcttgaactgcaatggcagcacgcccatgcccaccaggttggagcggtggatgcgctcgaagctctcggcaatcaccgccttgacccccagcaggttggtgcccttggccgcccagtcgcggctggagccggtgccgtattcctggccggcgatcaccaccagcggcgtgcccgacgcctggtatttcatcgacgcgtcatagatcgccatcttctcgccagtggggatgtacagcgtattgccgccttcctcaccgccgagcatttcattgcggatgcggatgttggcaaaggtgccgcgcatcatcacttcatggttgccacggcgtgagccgtaggagttgaagtcccgtggctccacgccctgttcgcgcaggtaacggccggctgggctgtcggtcttgatattgccggcgggggagatgtggtcggtagtcaccgaatcgcccagcaacgccagcacgttggcgcccttgacatctttgatcaccggcaacggccctgcaatgtcatcgaagaacggtgggtgctggatgtaagtggagtccttctgccacacgtaggtcgccgcttgcggcacttcgatggcttgccattgcgcgtcaccggcaaacacttcggcgtattccttgtggaacatgccggtgctgacctgggccacggcgtcggcaatctctttgctgctcggccagatgtccttgaggtacaccggcttgccgtcttgatcgttacccagcggttcgctgctgatatcaatgcgcacggtgccggccaaggcatacgcgacgaccagcggcggcgatgccaaccagttggttttcaccagcgggtgcacccggccttcgaagttgcggttgccggacagtaccgacgccacggccaggtcggccttctggatggccttctcgatcggctcgggcaaaggccccgagttgccgatgcaggtggtgcagccatagccgaccaggtcgaagccgagcttgtccaggtactgggtcaggccggccgccttgtagtagtcggtgaccactttggagccgggggccagcgaggttttcacccagggcttgcgggtcaggcccttttccacggcctttttcgccaccagcccggcggccatcatcacgctggggttggaggtgttggtgcaggaggtgatcgcggcgatcaccacggcgccgtttttcaggcgataggtctggccgtcgtattcgtagtcggcttcgcccaccaggtctgcattgcccacggcaaccccgccgccgccttcgctttccaggcgaccttcttccttgttggtgggtttgaattgcaggtcgaggaagtcgctgaaggcctggcccacattcggcagggctacgcggtcctgtgggcgcttcggcccggccaggctcgcttcgacgctgcccatgtcgagggccaggctgtcagtgaacaccggttcctggccggcgttgcgccacaggccctgggccttggtgtacgcctcgactaacttcacggtttctgccgggcgccctgacaggcgcaggtagtccagtgtcacctcatccactgggaaaaagccgcaggtggcgccgtactccggggccatgttggcgatggtggcgcggtcggccaacggcaggtcggccaggccgtcgccgtagaattcgacgaacttgcccaccacgccctttttgcgcagcatctgggtcacggtcaacaccaggtcagtggcggtgatgccttctttcagtttgccggtgagcttgaagccgatcacttccgggatcagcatcgacaccggttggccgagcatcgccgcttccgcctcgatcccgcccacgccccagccgagtacgccaagaccgttgatcatggtggtgtgggagtcggtgccgaccaacgtgtcgggaaacgcataggtgcggccgtcttcgtccttggtccacacggtgcggcccaggtattcgaggttgacctggtggcagatgccggtacccggcggcacaacactgaagttgtcgaaggcgctctggccccagcgcaggaaggcgtagcgttcgccgttgcgctgcatttcgatgtcgacgttctgctcaaaggcgtcggcgttgccgaacttgtcgaccatcaccgagtggtcaatgaccaggtccacgggcgatagcgggttgatgcgctgcggatcgcccccggccttggccacggcggcgcgcatggcggccaggtcgaccacggcgggtacgccggtaaagtcttgcatcaacactcgggcggggcggtactggatctcgcggtcggactggcgttccttgagccaggcggcgatggccttgaggtcggcgccggtgacggtcttgtcgtcttcccagcgcagcaggttttccagcagcaccttgagcgacatcggcagcttgtccaggtcaccgaggctcttggcggcttcgggcaggctgaagtagtggtaggtcttgtcgtcgatttgcagtgttttaagggttctcaggctatcaagggatgacattacatgactccttatggtccgcacggctacggacctgacgggacgaacagagctatcaacttagccctgttttcattagcaggctaataactggactctatcgttaagtccaaggttccgaagtccgttatcatgcgcgggttttcatgacaggcattgcgacagcgcaaggtcgttgattcacttggagaattgatgaacaccctttttatgcactgccgcccgggttttgaaggcgaagtctgttccgagatcgcggaacacgccgcgcgcctgaacgtttccggctacgccaaggccaagaccggcagcgcctgcgccgaattcgtctgcaccgaagaagatggcgcccagcgcctgatgcacggccagcgctttgccgagctgatcttccccaggcagtgggcgcgcggggtgttcatcgacctgccggaaaccgaccgcatcagcgtgatcctcgcccacctgcgcgaattcccggtgtgcggcagcctgtggctggagatggtcgacaccaacgacggcaaggaactgtcgaacttctgcaagaaattcgaagtgcacctgcgcaaagccctgctgaacgccggcaagttggtggacgacccgagcaagccgcgcctgctgttgaccttcaagagcggccgcgaagtgttcatgggcctggccgagtcgaacaactcggcgatgtggccgatgggaattccgcgtttgaagtttccgcgtgaagcgcccagccgttcgaccttgaagctggaagaagcctggcaccacttcatcccccgcgaccagtgggacgagcgcctgcacggcgacatgactggcgtcgacctcggcgcggcgccgggcggctggacctggcaactggtcaaccgtggcatgctggtgaccgccatcgacaacggccccatggccgaaagcctgatggacaccggcctggtccagcacttgatggccgacggcttcaccttcgtgcccaagcagccagtggactggatggtctgcgacatcgtcgagaagccggcgcgcaacgccgcgctgctggaaacctggatcggcgaggggcattgccgcgaggcggtggtgaacctgaagttgccgatgaagcagcgctacgccgaagtgaagcgcttgctggagcgcattgaggacggcttcaaggcgcgtggcattcgcgtggagatcggctgcaagcagctgtaccacgaccgtgaggaagtgacatgccatttgcgtcgattggaaacagcgaagaaacccaaggctcgctgaacagttgaaatcaccacaggacccctgtgggagcgggcttgcccgcgaaagcggtataacagtcgaaacttatgttgaatgtgcccgtgtcttcgcgggcaagcccgctcccacctttggagcggcatccgtttcaggagtgatgtatgaacctcgatttgcccgtcgacgccaccctcgacgccaccggcctcaactgcccggagccggtgatgatgctgcaccagcacatccgcgatctgccgcccggcggcctgctcaaggtgatcgcgaccgacccgtccacgcgccgcgatattcccaagttctgcgtgtttctggatcacgaactggtggatcagcaggaacaggccggtacgtacctgtactggatccgcaagaagtctgcttaaccctgcgctttatctacgcggatgcgccggcgcgcactgcgcgccaggcgcaccagcagcatccccgcggcgcagctcaggcccacgatcagcccttgccataagccgctcgggccgctcggttcgccgagccagtcggtcaggcccagggcataacccaccggcaggcccacgccccaataggcgaacagggtcagcaccatggtgacacgggtgtcctggtagccacgcaaggcgccggcggcagtgacctggatcgaatcactgaactggaacagcgctgaaaacacgatcagcgtggatgccaggtggatgacgatcgggtccggggtgtagatcgccgcaatctgctcgcgcaacagcagcatcaagctgcatgaaaggcacgcgtaggccagcgccgtgcccatgccgacacccgcggcgaagcgtgcttcacgcggttcaccacggcccagggcctggccgacccgtacggtgaccgccatgctcagcgagtagggaatcatgaacaccagcgagctgacgttcagcgcgatctgatggcctgagaccaccgtggcgccgaggctgccgatcagcagggcgatgaccgcgaaaatgctggactcagcaaagatcgcgatgccaatcggcaagccaatcccgagtacgcgcttgatcaccgcccattgcggccagtcgaagcgcttgaacaactcgctgctctggtacgccgggccgaagcgtgtccacacggccaggccaatcaccatcgcccacatcgaaagggccgtggcccagccgcagcccacgccgcccatggccggtacgccgaggtggccgtagatgaagatgtagttcagcggaatattcagcgccaggccgaccaggcccatgaccatgctcggccgtgtgcggcccaggccgtcgctgaagcagcgcagcacgtagtacagcgcgatggccggcatgcccgaagcgatgccgtgcaggtagcccatggacggtttgatcaggtcggcctcgaccttcatccagtgcaggattggttccgcgcacaacagcaacagcccgcctacgatgccgaccacaatcgccagccacagcgactggcgcaccagtggcccgatctcgctgaatttcccggcaccgtagcgctcggcgacttttggcgtggtggccagcagcgtgccgctcatcagcaggtacaccggaatccagatcgagttgcccaggcccaccgccgccaagtcttgggggctgacgcgtccggccatcaccgcatcgacaaaactcatcgccgtcgtggccagttgaccgatcatgatcggcagggcaagcgtcagcaggccgcgcacttcccggcgaatgcgggcggggcgggtaaggggggcggtggcagtgttcacgtacaggtgtccagtcgagggcagcgcaaggacggcggattctacgcgctgacgcatcggtcaggaaaaaacctgtgttagcgatttgtaagcgagggctgcgatccctgtacactgcgggtccgcctaaggagcctgccatgctgattgttgccgacgaaaatattccgctgctcgatgcctttttccagggtttcggtgaaattcgccgcgtgcctggccgctccattgacagtgcgacggtcgagcaggccgatgtattgctggtgcgctcggtgaccaacgtcaaccgtgccctgctcgatggcacgaacgtgcgctttgtcggcacctgcaccatcggcaccgatcacctggacctcgactacttcaaacaggccggcatccagtggtccagcgcccccggctgtaacgcccgtggcgtggtggattatgtgttgggcagcctgatgacgctggccgagatcgaaggcgccgaccttaaccagcgcacctacggcgtggttggcgccggtgaagtcggcgggcgactggtcaaggtgctcaagggcctgggctggaacgtgctggtctgcgacccgccccggcagatcgccgaagacggcgattacgtcagcctggcgcagatcatcgagcagtgcgacgtgatcagcctgcacacaccgctgaccaagtccggcaacggctccacctggcacctgttcgaccgccagcgccttgagcagctcaagcccggtacctggctgatcaacgccagccgtggcccggtagtggacaatgctgccctgcgcgaggtgctgctggagcgcgaagacctccaggcggtgctggatgtgtgggagggtgagccggaagttgacgtcgacctggctgatttgtgcgtgctggccacgccgcatatcgctggctacagcctggacggcaagcagcgcggtacggcgcagatctatcaggcgttctgcgcgcacctggggcaggagccgagcattcaattgcgtgatttgctgccaccgccgtggttggccgaggtgcagctgaatgcgtctaccgacccggcttgggcgctggcgacgctgtgccgcagcgtgtacgacccgcgtcgtgatgatgcggatttccgccgcagcctggtaggaacggtggacgagcagcgcaaggcgtttgacctgctgcgcaagcactaccccgagcgccgcgagatcgatggtttgaaggtgcgcatcctgggtgagtcggctgtgttgtcgaacatcgtgtccgcgttgggcgccgaagcggtttagagaccaataaaaatctatggtcacccccatttttgcaatactgattaacgggtggtgtggttggcttgcttaaatctatccggcgtctgtttggggcttgccccagcgccacgatgagagtcgcg

SEQ ID NO: 71 - DNA, 42866 bp, Pseudomonas nodulensis
tttgccgagatcgatcccgatcagtgctgactcgctcatgatgatggcctccgaaaacaaaacaccctgtgaaagcgtagccctcacagggtgttgggggtgaccatctcattaacccggccaccagggccgggtttgaaagagcgtgggcgcttcagccttgctgggcaggcttgaccagtcgctgttccagttcgctgcacgcttgctggatcatctcttcggtgatctgcacttcgcggccttgggcgtcaatgtacgagcaaggcaactgctgcggctggcggatcacttcaatcttggcatcgctgctgttctgcaaggtcatggcctgtctcctcatcaggttgtgtacctactctaaagcccgcgcgtgaccaggctgttacaactccctgccaggtcagcggttcgaacactcagtccaccagaaaccaatacaaatttccagccaggggttagaccgatagcctctagggatcagcatcggcgggcataattaacctgactcattgctattcgcccaagttccccccatgtaggtgtacagacttctcattggtgatgctctccatgttctcagtccgtcaacgccgtgccattcgcctggccagtcgattcatcgcgccttaccgctggcaggcgcttggcgccctgttggcgctgatcgtcacggccggcatcaccttgtccatggggcagggcatccgcctgctggtggaccaggggttcatgacccagtcgccgcacttgctcaaccagtccatcgggctgttcatgatcctggtgctgggcctggctgtcggcacctttgcgcggttctacctggtgtcgtggatcggcgagcgggtggtcgcggatatccgccggcaggtgttcaatcacctgatctacctgcatccgggcttttatgagaacaatcgcagttcggaaatccagtcacgcttgaccactgacactacgctgctgcaatcggtgatcggttcgtcgctgtcgttgttcctgcgcaatgccttgatggtcatcggtggcatcgtgctgctgttcgtcaccaatcccaagctcaccagcatcgtggtggtggcgctgccgctggtgctggcgccgatcctgatcttcggccggcgcgtgcgcagcttgtcgcgccagagccaggaccgcatcgccgatgtgggcagctatgtgtcagaaaccctcggccagatcaagaccgtgcaggcctacaaccaccaggtgcaggacgaacagcgcttcgccgtcaccgtggaagatgccttcaccaccgcacgcaagcgcatcacccagcgtgcgtggctgattaccctggtgatcatgctggtgctcggcgccgtgggcgtgatgctgtgggtcggcggcatggacgtgatcagtgggcgtatttccggcggcgagctggcggcgtttgtgttctacagcctgattgtcggcagtgcggtcggcaccctcagcgaggtgcttggcgagctgcaacgtgccgccggtgccgccgagcgcattggcgagttgttgcagtcgagcaacgagatccaggcgccggtcgccggcactgtccagttgccggcgcgggtcagcgggcgcatggagctgcaggacctgcgcttttcctatccttcacggccggacagctatgccatcgacggcctgaacctgaccatcaaccctggcgaaaccctggcgttggtcggcccttccggtgcgggcaaatcgacgatcttcgacttgctgctgcgcttctacgacccccagcaaggccggatcctcattgaaggccacccgctgaccgaactcgaccccatggacctgcgccgccacttcgccctagtgtcccagagcccggcgctgttctatggcagcgttgaagagaacatccgctacggcaacccggcggccacccaggaacaggtcgaagcagcggcgcgcattgcccacgcccacgatttcatcctgcaaatgcccgacggttaccagacccacctgggcgacggcggcatgggcctctctggtggacaacgccagcgcttggccatcgcacgggcgttgctggtggacgcgccgatcctgctgctggacgaagccaccagcgccctggatgcgcagagtgaacacctgatccagcaagcgctgccgcaattgatgcaggggcgcactacgctggtgatcgcccatcgactggccacggtgaagaacgccgaccggattgccgtgatggaccagggcaagctggtggcggtggggacacatcagcagttgattgcgagcaatgcgttgtatgcaaggttggcggcgttgcagttcagtgacggggccgaggtcggaaaaagcgaacgttaacgcggcctatgtggtgaacaagcttgttgtggcgagcgggcttgccccgcgttgggctgcgtagcagccccaaaacgtcacactgcttggcctggattgggagcgcttcgcactccaacgcggggcaagcccgctcgccacaaatgccagcttggccctcaggcaatgaactcactgatcatcaaaataccgctcatgccaatccaccaacggctgcggtgaattgagcttctgcccgtagatcaccgaataagacagcacgttctgcacatactggcgggtttcgtcgaacggaatgctctctacccacacatcgaagctcaggtggtcggcgccgcgcagccactggcgtacacgaccggggccggcgttgtaggcggcggaggcgagtacgcggttgccgttgaactggctgtgcacttggctcaggtaggcggcgccgagctggatgtttttgtccgggtccagcacctgggccggggaggccagggggatgctgaacttgcgtgcggtttccttggcggtgccgggcatcagttgcatcaggccgctggcgccgacgccggagcgggcgtcgtccatgaaggcgctttcctggcgggtgatcgcgaacacccagctcgaatgcaggccgcgcaccttggcttcacgcaccagggtatcgcggtgggccatcgggaaacggatgtccaggtcgtcccagtactgcgcctggctgatggtgcggatggctgggaagtaccacttcatgtcgtaggccagcttggcctgggcgaccatttcgtcgcggttgaagtgacggctgacgtggtaccactcacgacggccatccaccacctggccgcgtgcatagaactccagggcgcggcgcacgcccggggtattgcgcactttgttgaccagcgcctggctcatcagcaggggtttgttcttcaactggtacggggccttggagcgatcggcggcaaggaaaccgtagaagtcacgctcctgcgccaggtgcttgtacaagaccagcgcttgcgggttcttcggctcggccagttccaggctgcgggcctgccagtagcgccagcggttggtggtggccaggtcttgtggcagtttgcgggtcaactggtaggcatcttcccagcgggccaggcgcagcagcaggcgcaggcgccactcggacacggtgttgtcgcgcaactcgggatcgtacttggtcatcacctcaagggcgcgcgggtcatagcgcttggccagggtgaggccgatttcccgggcgatcgacactttttcgtcacgggagaagtgcatgctgctggcgtagccgtcgagcagggccatggccttgtccggatcctggcgtgccaggcggcgcaggcccaggcctacggcgtcggacatggcctcggtggccggcaggaagcgcgaggggtcgctgagcatgtccggcttttgcgccacgtccaccatcaggcggccttgcgggcccagcgtgcgcagggtttttaccaggctgttggccagcgcgtagttgcgcgcttcggcggcgagtttggcgcggtcccagatcttctgttcggtgagttggccgtcagccgcccattggccaaaggtgacatcgcaggcagccggttgggacttgcctgtcatccagagtttttcggcggtcttgtagccctcggccttcagattatgggtgagctggtactggccgtgcaggcagtccagttcgacgaaattgagcttggcatcgtagtacttttcaaaggtctgccagtcgccgcgttcggccagccagcgcaaccagcgcagtttcatccagttggcctggggcaggtcgccgtttttggcgaggaactgctcgatttcctggttgctcgcggttttcaggcgggcggtcagttcgtcgtaggccagatagggtgtcaacgggtagtcggccagggcctggctgtattgcatgtacggcccggtatcgcccttggccagggcgcgtttggcttcatcgtagtattgacgttgggtggtgaggtccacggcctgggcggattgaacggcggtggcggaaagaagcagacaagataaaaagctgaaaaggcgactgcgcatgagacgtccgtgcagaggaatctggacaagtgccggcatcgccgacactgattgcccctagcttagccttttgcctgacgccggtgaaagctttgacggccgcttcgttcaagttcctcggaaatgtctctcagagtatgtcgactgagaaaatcccggccgcctcagcccctaactcaggtagaatgcgcgcccagtttttggagaagcgtatgaccctgctcaaattcagcgatgtgtcccttgctttcggcgccatgccgttgttggacaaggtgtcctggcagatcgcccgtggtgagcgggtgtgcatcatcggccgcaacggcaccggcaaatccagcatgatgaagctggtcaagggcgaccagaagcccgatgacggctccgtatggcgcgcgccgggcctcaagatcggcgaattgccgcaagaattgccggtggccgacggacggacagtgttcgacgtggttgccgaaggcctcgacggcgttggcgcactgctcgccgaataccatcacctggcacagaactgtgtcaccgaagatgacctgaacaagctgatgcacgtccagcaagacctggaagctcgtgatggctggcgcttgcagcaattggtcgacagcaccctgagtcgcctgcaactgccggcggacaagaccctcgccgagttgtccggcggctggcgtcgtcgcgtgctgctggcccaggccctggtgtccgagcctgatttgctgctgctcgacgaaccgaccaaccacctggacatcggcgcgattgcctggctggaagaagcccttaaggaattccagggcgccgtgctgttcatcacgcacgaccgttccttcctgcagaacctggcaacgcgcatcctggaactggatcgtggtggcttgatcgactggaacggcgactacgccagttttctggtgcacaaggaagccgcgctggccgccgaagaaaccgccaacgcgctgttcgacaagaagctggcccaggaagaagtctggatccgccagggtatcaaggcccgtcgcacccgtaacgaaggccgcgtacgcgccctgaaagccctgcgtgttgagcgcagcgagcgtcgcgagcgtaccggcaaggcgaatatccagctggacaccgccgacaagtcgggcaaacaggtgatggtgctggagaacgtcagcttccatcacccggatggcccgttcttgatcaaggacttttccatggtcctgcagcgcggcgaccgtatcggcctgctgggcgccaacggtactggcaagaccaccttgctcaagctgatgctcaacggcttgcagccgaccagcggtaaagtggaggagggcacgcggatcgacgtggcctacttcgaccagttgcgccatcagttggacctggaaaagaccgtaatcgacaacgtcgctgaaggccgcgactttatcgatatcgacggccagagccgtcacgtgctcagctacttgggcgacttcctgttcagcccgcagcgtgcgcgtaccccggtgaaagccttgtccggtggtgagcgtgcgcgcctgctgctggccaaactgttcagcaagccggccaacctgctggtcctcgacgaaccgaccaacgacctcgacgtggaaaccctcgagctgttggaagaagtgctgctgaccttcaacggcaccgtgctgatggtaagccacgaccgggcattcctcgacaacgtggtcaccagcaccttggtcttcgaaggtgagggcaaggtgcgtgaatacgtgggtggttaccaggactggttgcgccagggcggttccccgcgtttgctgggcgtgaccgagagcaagtccggcaaggccgacttgacctccgccgtggtggctccggtggttgctgctgcaccggcgcaggacgccgcgccggcggccaagaagaaactcagctacaagctgcagcgggagctggaggccttgccgggtgatatcgacgccaaggaacagcagattgccgcggtagaagcgcaaatggctgacgcggggttctacctgcgtccggcggcggaaacggccaaggtcatcgcttccctggagaaactgaaccaggagctggaagtgttggttgagcgttgggctgagttggatgcctgagtgatctcagcgcattaaaaaagcccggcgttcattcgtatgaacgccgggctttttatatcggtcttaaggggcttttaccagcttgacggccagcacatcgcacggcgcgccatgcaggacgtcattggcggtggatcccagcaacagcgccaaaccatgacggccatggctaccgaccacgatcaggtcacaacccttttctttggccaggtggtggatttcctggcgcggttggccgtaggtcaggtggcagtcttcctttttcaggtgcgggtacttgagaatcaaacggtccagacgctctttggcctggtcgaattgttgttgctgcaactgggaaaggtccatcggcacgtcaccgccaaaggccatggccatgggctcgacgatgtgcaccagtgacagtacggcaccattggccaatgcagattcctgcgcgcgcttgatcactggatcgcactcttcggtcagatcgacagcgaccagaatatgttggtagggcatgaggcgttcctccagggggactgcaatagattcagtatggctgctttcaagcggatagggttgcgtcagatcaaatccgctcatctgtaaattcgggagtacacatatgacggtctggatagtggtgtcaatccttgtggtggtgctcagccccctggcatggctgcgcccgtcgcgccaccagagcggacgcatggccctgcgcatggaggcgcgccgcatcggcctggccatgcaactggcgccccaggagtggccgccctggctcaagcaggagccgccgagcccttgcgcgcagtactgccggccacggcgcggcagtacgccggcgatctggtgttattggcagttggagccaagtgtgtgggtcaatcagtggcgtgaagtgtgcgtcgatgaaaagttgttgccgcattttgcgacgctgccggacaacgtctacaagatcgaagccgacaagcagatgatcgccctgtattggggcgagaagggcgaggcgagcgtgttgaaggatatcgatgcgctgctcaaggcgttggcctgaattgcaggcaataaaaagcccgacaatcatcatcgggctggagttggccaggcaggccggtaaatctttggttgcggctagcctagccgcatatcccattctgtacagccttttcccacatcttttctattattgatttcgtgaatatttgaatattggcgaggcgcacgtatgagggcggggttctgaactgactggaaagtcgcgtttttcctagcctttggagcgattgacaattgcccggaattggatgaaggtggcgtacccaaatcaaacgggcgtatgaattgagcgtttgtctgtcagacgactcatacagaatcccgactatcgcattggcgggtgtgcctggcggattggcgtgaacattgaagatttcatcaatgtccaacccataggccagcgtccaatgtgtactgttcagcttccatatcgtggagatcagttgatgatttacgaaggtaaagccatcacggttaaggctcttgaaagtggcatcgtcgaactgaaattcgacctcaagggtgagtccgtcaacaagttcaaccgtctaaccctgaatgaattgcgtcaggccgtagacaccatcaaagcagatgcttcggtcaagggcgtgatcgtctccagtggcaaggacgtgttcatcgtcggcgctgacatcaccgaattcgtcgacaacttcaagctgcccgatgccgagctggtggctggcaacctcgaagccaacaagattttcagcgatttcgaagacctcaacttaccgaccgtggctgccatcaacggcatcgcgttgggcggcggcctggaaatgtgcctggcggcggacttccgcgtcatgtcggccaccgccaagatcggcctgcctgaagtcaagctgggcatctatccaggttttggcggcaccgtgcgtttgccgcgcctgatcggtgccgacaacgccatcgagtggattgccgccggcaaggaaaacaaagccgaagacgccctgaaagtcggtgccgtcgacgctgtagttgccccggacaaactggccgaagccgcactgaacctgatcaagggcgccatcagtggcgaatttgactacaaggccaagcgtcagccgaagctggaaaaactcaagctcaacgccatcgaacaaatgatgtcgttcgaaaccgccaaaggtttcgtggctggccaggccggcccgaactacccggcgccggttgaagcgatcaagaccatccagaaagccgcgaacttcggtcgcgacaaagctctggaagtggaagcggctggcttcgtcaaactggcgaaaacctccgctgcgcagagcctgatcggcctgttcctgaacgatcaggagctgaagaaaaaggccaaggcctatgacgaaatcgcccgcgacgtgaaacaggctgccgtactgggcgccggtatcatgggcggcggtatcgcctatcagtcggcgtccaaaggcacgccgatcttgatgaaagacatcaacgagcacggcatcgagcagggtctggccgaagccgcgaaactgctggtgggccgcgttgataaaggccgtatgaccgcagcgaaaatggctgaagtgcttaacggcattcgtcctacgctgtcctacggcgatttcggccatgtcgacctggtggtcgaagcggtggtcgagaacccgaaggtcaagcaagcggtcttggctgaagtggaagcccaggtcaaagacgacactatcctggcgtccaacacctcgaccatttccatctcgctgctggccaaggccctcaagcgtccggaaaacttcgtcggcatgcacttcttcaacccggtgcacatgatgccgctggtggaagtcatccgtggcgagaagtccagcgagctggcggttgccaccaccgttgcctacgccaagaaaatgggcaagaacccgatcgtggtcaatgactgcccgggcttcctggtcaaccgcgtgctgttcccgtacttcggcggtttcgccaagttggtcagcgcgggtgtggactttgtgcgcatcgacaaggtcatggaaaaattcggctggccgatgggcccggcgtatctgatggacgtggtcggcatcgacacgggtcaccatggtcgcgacgtaatggctgaaggcttcccggaccgcatgaaagacgaccgccgctcggcgatcgacgcgctgtacgaggccaagcgcctgggccagaagaacggcaagggcttctacgcctacgaggcggacaagaagggcaagcagaagaaagtcgccgacccgtcggtgcacgaagtgctggctccggtcatctacgagcagcgtgaggtgtccgacgaggacatcatcaactggatgatgatcgccctgtgcctggaaaccgtgcgctgcctggaagacggcatcgttgaaaccgccgccgaagccgatatgggcctggtgtacggtattggtttccctccattccgtggtggtgcactgcgttacatcgattcgatcggtgtggctgagttcgttgccctggctgacaaatacgctgatctgggcccgctgtaccacccgaccgcgaagctgcgtgaaatggccaagaacggccagagcttcttcggttaagcgcccagacgactagagcgagaatatttatgagcttgaatccaagagacgtggtgattgtcgacttcggtcgcacaccgatgggccgctccaagggcggcatgcaccgcaacacccgtgccgaagacatgtcggcgcacctgatcagcaagctgctggaacgcaacgtcaaggtcgacccgaacgaagtcgaggacgtgatctggggttgcgtcaaccagaccctggaacagggctggaacatcgcgcgcatggcctccttgatgacccagatcccgcacaccgctgccggccagaccgtcagccgcctgtgcggttcgtcgatgagcgcgctgcacaccgccgcccaggcgatcatgaccggtaacggtgatgtgttcgtggtcggtggcgtggagcacatgggccacgtcagcatgatgcacggcgtcgaccctaacccgcacatgtcgctgtacgcggcaaaagcctcgggcatgatgggcctgaccgcggaaatgctcggcaaaatgcacggcattacccgtgaagcccaggacgcgttcggcctgcgttcccaccagttggctcacaaggcgaccgtggaaggcaagttcaaggatgaaatcatcccgatgaacggctacgacgagaacggtttcctgaaactgttcgactacgacgaaaccattcgtccggacaccaccctggaaagcctggcggcgctcaagcctgctttcaatccaaagggcggcaccgtgacagccggtacgtcgtcgcaaatcaccgacggtgcctcgtgcatgatcgtgatgtcggcgcagcgtgcccaggacctgggtatccagccgctggccgtgattcgttcgatggcagtggcgggtgtggacccggcgatcatgggctatggtccagtaccggccacacaaaaagccttgaagcgcgcgggcttgaccatcaacgacatcgacttcttcgagctcaacgaagctttcgccgcacaggccctgccggtgctgaaagatttgaaagtactcgacaagatgaatgagaaggttaacctgcacggcggcgcgattgccctgggccacccattcggttgctccggtgcgcggatttctggcactttgcttaacgtgatgaagcaaaatggcggcaaccttggggttgcaaccatgtgcattggtctcggccaaggcatttccaccgtcttcgaacgcgtttaagcgttgggttgacggaagccggggcccagtgccccggtttttgttttttggaatttttaatattttttttcaacaaattttgtaagagggccagagcatgaaagtcgaaccagggctctaccagcattataaaggtccgcagtaccgtgttttcagtgtggcgcggcactccgagaccgaagaagaagtggtgttctaccaagctctgtatggcgattacggcttttgggtacgcccgttgagcatgtttctggagactgtcgaagttgacggcgagcaggtcccgcgctttgctttggtccaggccgaacccagtcttttttcagggcaataacggcaggtcgcgcagactgctgcgcttgacctcaccttgttgccactatatatagcgttgccgcgacaggcgccaactgcctttcacttctcgaattcaggaattttccgatccatgggcaaatcgctggtcattgtggaatccccggctaaggccaagaccatcaacaagtacttgggcaacgagtacgtggtgaagtcgagtatcggccatatccgagacctgcccaccagcggttcggctagcgccagcaaggagccagccgccaagcgcggcaaggcggctgcgggcgaaggtccggtgctcacccctaaagagaaagcgcgcaagcagctggtctcgcgtatgggggtggacccggatcatggctggaaggccaagtatgaaatccttcccggcaaggaaaaggtcatcgaggagctgcgccggctcgccaaagatgctgacaccatctatctcgcaacggacttggaccgcgaaggggaagccattgcctggcacctgcgagaagccatcggcggtgatgacagccgctacaagcgcgtggtgttcaacgaaatcaccaagaaagccatccaggaagccttctccaagccaggcgaactggacatcgaccgcgtcaacgcccagcaggcgcgtcgcttcctcgaccgcgtggtgggttacatggtatcgccgctgctgtgggcgaagatcgcccgtggtctgtcggccggccgagtgcaatcggttgcggtgaagctggtggtggagcgcgagcgcgagatccgtgcgtttatccctgaagagtactgggaagtccacgctgacctcggcaccgccaagggcgccaatgtgcgctttgaagtggcccgtgagaaaggcgaggccttcaagccgttgaacgaagcccaggccatggccgcgctggaaaagctcaaggcttccagctacagcatcgtcaagcgtgaagacaaaccgaccagcagcaagccgtcggcgccgttcatcacctccaccctgcaacaggccgcgagcaaccgcctgggcttcggtgtgaagaagaccatgatgatggcccagcgcttgtatgaagcgggctacatcacgtatatgcgtaccgactccaccaacctgtcggtggacgcggtcgccatggcgcgtacctatatcgaaagcgaattcggcaagaagtacctgccggagaagccgaacgtctacagcagcaaggaaggcgcacaagaggctcacgaagcgattcgtccttccgacgccaacaccacgcctgccaagctcagtggcatggaacgcgacgctgagcgcctctacgagctgatctggcgccagttcctggcctgccagatgctgccggcgcaatacctgtccactaccgtgagcgtgggcgctggcgacttcgagctgcgtgccaagggccgtatcctcaagtttgatggctacacccgcgtgatgccgcagatcgccaagccgggcgatgatgacgtgctgccggacatggcccagggcgatacgctgaagctgatcaagctcgacccgtcccagcatttcaccaaaccgccggcgcgctactccgaggccagcctggtaaaagagatggaaaaacgtggtatcggtcgtccttcgacctacgcggcgatcatctccaccattcaagaccgtggctacgtggcgctgcacaaccgtcgtttctattcggaaaagatgggcgatatcgtcaccgagcgtctgtccgagagcttctccaacctgatggactacggcttcaccgccggtatggaagagaacctcgatgacgtggcccagggcgagcgcgactggaaaaacgtgctggacgagttctacggcgacttcaagaagaagctcgaggtggccgaaagccctgagagtggcatgcgtgccaaccagccggtgatgaccgatattccgtgccagacctgtggccgcccaatgcagattcgtactgcatccaccggcgtgttcctcggttgttcgggttacagcctgccgccgaaagagcgctgcaaggccaccgtcaacctggtgccgggcgacgaaatcgccgccgatgacgagggcgagtccgagtcgctggtactgcgtggcaagcaccgctgcccgatctgcagcacggcgatggacgcctacctgttggacgagaagcacaagctgcacatctgcggtaacaacccggattgcaacggctacgagatcgaggaaggcacttatcgcatcaagggctacgaaggtccgagcctggagtgtgacaagtgtggcagcgagatgcagctcaagactggccgttttggcaagttcttcggttgcaccaacccgacctgcaagaacacccgcaagctgctgaaaagcggtgatgcggcgccgccgaagatggacccggtgaagatgccggagctcaagtgcgagaaggtcaacgacacctacatcctgcgtgacggggcttcggggttgttcctggctgcgagccagttcccgaaaaaccgtgagacccgtgcaccgctggtgctggagatcgtgccgcacaaggatgagatcgatccgaagtaccacttcctgtgtgaagcaccgaagaaggatccggatggtcgcccggccgttatccgctacagccgcaagaccaaggagcagtatgtgcagtccgaagtggacggcaagccgaccggttggaaagcgttctacgacggtggcaagtggaaggtcgaagacaagcgtcagggcgcttgatccggcggatgcgctgaagatccaatgtgggagggggcttgcccccgatagcagcatatcagtcaacatgtgtatgactgatactccgctatcgggggcaagccccctcccacatttgggtctgtttggttctttaggcccgcataggcagcggtttattgcacttgcagtaggttcggctgatccgtgaaactgttcagccagcatcacgcttattcgttgtggagattgccgtcatggcctacgaactctatacccgtaccaatcagaaaatttacttcgcgggtttgtccctggaagcccttggccgtgccgaggaagggaaggagatgaatgccatcgcgctggtccaggcggggcgtgaagcggcgttgttccacctgtacggcgccttgctgggcctgtgccacgaaatcgccggcttttaccgtctgccccaggccggctcgccccgtgctgaaatgatcatgaatcgcgaagtgctcgattcgatggcgattcctgaattggccgagctggtggaaatggcgcaaagccccgacagttgggttgcacgcctactcaaggcgcatgccgatatgttccaaccgccgcgcattccccatgtgcccaagggggatgtgactcagccgctgattgtggcggttgcggtggaagaggaagaacccaagccgttgagccgcgaagagctggaaggctggcgccaggaattgaaaaaaatggcgttgcgctttcgcgaaggcctcaacgagtgctgatcattctgtaggaattggatagcgaccattcatcaagctgtcaagaaacctgttcagatcctctgcgaggctgggtggatgactgatataatcccggcctttcgtggagaacagacttttatgccgacgtcctttctggaaattgttgagttgcctgacggccgaatcgagctgcgccgggctgaggacgaaggttctctggtcattctggatttttccgaggacgccaaggtgttcctgcagggccaacacgtggaagtggctaaagccatgttgagcgtgggtgtgcagatggcaggtcgcctggcagaaggcgaaccggagaaagaagacgggccgcgggttcttcactgagttctgtggtgaaggagtctggggtggttagacaggcttctgtggtgagctagcttgcttgtagtgagtggacttgttgtggtgagcgggcttgccccgcgcagggctgcgcagcagccctaaatagattgacgcagtacatcaggtattccacggtgcttggttttggggccgcttcgcagcccagcgcggggcaagcccgctcaccacagaagcccgcatgtcacaggacttcggtcgatcagcactagcccaatcgaatattcaaactctgcgcatcacccgtacgagcagcgctgatcaactgctgcttggcgctgacactcagtggattcaaccagctcaccactgtatggctgcggcccaggcgaagtgcttcgcaggtcaactgttgggcactttgcgcgccgcgtggttgcagcagcaggatgcgctcgcgattgaggccggcgtcccgtagccaggcctgggtcaggctggcgggcggggcgatcagtgtcagccagcgggcgtcctgctcttcgctcaactcgcgcaggatgggcgccagcaggctcaggcagctccctgctgcaccgcgcaacgacaattcactgaacgcctcaggctcggcgctccagggcgcttcgatcgtttccttgaggatgggcgcaaggggttgggccatgaaggcctcgaacagcgacagttgtgtgtgttgtggggtgtggacgagctgcatgatgcctcctttagcggcgaatgacgccgacgctcaggccttcgatcaccaggtcctggtctttcaggttcacttcaatcggggcgaactcagggttctcggccaggagccaaaccttactgccttcgcgcttgaagcgtttgacggtgacttcatcgcctatacgggcgacgacgatctggccattacgggcttcgcgggtggtgtggacggccagcaggtcgccgtcgaagatgcccacgtccttcatgctcatgccatggacccgcaacaggtagtcggcgcgagggtggaagaaggtagggttgatgttgcaggactcctcgacgtgctgctgcgccaggatcggcgcaccggcggcgacgcggccgatgatcggcagggtcgattcgtcggccttggcctcgaagccagggatgcgaataccgcgtgaggcaccgggggtcatctcgatcgcgcctttgcgagcgagggccttgaggtgttcctcggcggcgttgggggacttgaaccccagttccagcgcaatctctgctcgtgtcggcgggtagccgttgtcatcgaggcagcgcttgataaaagccagaatctcagcttggcgtggcgtcagttttagcatgttgatcgctctgtctttttatacagtgactgggattatatacagtgaactgcgcttggcaatcatccttttccagccctccgctggacggtcatccctgaggcttcccacaggcccgagatagcgctgcctacagatcaatagagatgtgattaaatagcgatgaaatacatgactgcccggccggaaagcgaactcgcaggcttgacaagacacaccctgaaacgtatgtttcaaacaagtgtttgtcaggcggagtagccatggcccagtcggaaaccgttgaacgcattctcgatgctgccgagcaattgttcgcggaaaaaggatttgctgaaacttcattgcggctgatcaccagcaaggctggcgtcaacctcgctgcagtgaactatcacttcggctcgaaaaaggccctgatccaggcggtgttttcgcgtttcctggggccgttctgcgccagtctcgaccgtgagctcgagcgtcgccagggcaaggctgaccacaagccgacactcgaagagctgctggaaatcctcgttgagcaagcgctggtggttcaaccgcgcagcggcaacgacctgtccatcttcatgcgcctgctcggcctggcgttcagccagagccagggtcacctgcggcgttacctggaagacatgtacgggaaggtatttcgtcgctatatgttgctggtcaacgaggctgccccgcgtattccgcccatcgagctgttctggcgcgtgcacttcatgctcggtgcggcggcgttcagcatgtccgggatcaaggcgctgcgggccattgccgagaccgatttcggcgtcaacacctctattgagcaggtgatgcgcctgatggtgccattcctggctgccggcatgcgtgccgaaaccggtgtgaccgacccgacgatggcggccgcccaattgcgcccgcgcagcaaatccgcgccaacccccgccaaggtttgaccctgccgggtgtgcgcagccgcttgcatccgctaagctagcggcccatgccgaattcagctatttactcgcaacctgttgtgctcactgtgcctggtgggtgcaatgggttgtgcgcgttatataaggaagatttatgactgctgccctgcaaggttcattgatggtcgacgttgccggcacttggctcacggccgaggaccgccatctgctgcgccagcctgaggtgggcggcctgatcatttttgcacgcaacatcgagcacccgcgccaggtgcgcgagttgagtgcggcgattcgtgcagtgcgcccggacctgctactggcggtcgaccaggaaggcggccgcgtacaacgcctgcgtcagggctttgtgcgcctgccggccatgcgtgccttggcggataacccgaatgcggaatacctggccgagcagtgcggctggatcatggccaccgaagtactggccgtgggtctggacctgagcttcgccccagtgctggacctggattaccagcgcagcgctgtggtcggcacccgttccttcgagggcgaaccggagcgcgccgccgtgctggcgggtgcattcatccgtggcatgaacagcgccggtatggccgccaccggtaagcacttccccggtcacggttgggccgaggccgattcccatgtcgccattcccaatgatgagcgtagcctggaacagattcgcgccaatgacttggtgcctttcgcacgcctgagtcagcaactggcggctgtcatgcccgcgcacgtcatctacccgcaagtcgacacccagccagccggcttctcgcgccgctggttgcaagacatcctgcgcggtgagttgcagttcgatggggtgattttcagcgatgacctgtccatggcaggtgcccatgtggtgggcgatgccgccagccgcatcgaagcggcgctgacagctggttgcgacatgggactggtctgcaacgatcgcgcagctgccgaattggcgttgagcgccgcccagcggatgaacgtcaagccttcggcgcgcatcgcacgcatgcgcggccagacggtcgcctcgactgagtacaaacaggatccgcgttggttggcggcgctgactgcgttgcgggatgctcagctgattgagtgaagaccgcgtcgcgcccatcgggggcaagccccctcccacattttgatctgtgaacctggtcaagtgtgggagggggcttgcccccgatggcgatgttaccgtcaacgcttctcttgcttatgcggcaacggcgcaaacagcgcttcgatatcctcgttgcccaattgccaatccccggtcgtacggccatccagcacacctgccgccaggtcggacttttccttttgcaggtgctggattttctcctccaccgtgccgcgggcaatcatcttgtagacaaacaccggcttctcttgaccgatgcgatacgcacggtcagtcgcctggttctccgtcgccgggttccaccaggggtcatagtggatcaccgtgtcggcttcggtcaggttcaagcccacaccaccggccttcaggctgatcaggaaaatctgcagcttgccgctctggaagtccttcaccggcgtgcgccgatcccgcgtctggccggtcaacaaggcgtaggcaacaccgcgctgtttcagctcggcttcgatcaggctcaacatcgaggtgaactgggaaaacagcaggatccgtcgaccttcctcaaataactcctcaagcatttccatcaagctatcgagcttgcctgaactgctgccacgggcgggcagggtggcgtcgttgaccaggcgcaagtcgcagcacacctggcgcaacttcagcagcgcctcaagaatgatgatctggctgcgtgccacgcccttgcgggtgatctcgtcgcgcaccttcttgtccatggccaggcgcatggtttcgtacacgtcgcgctgggcctcgttgaggtcgacccaatggatgatctcggtcttgggcggcagctccgtagccacttgttccttggtgcggcgcagcaggaagggtttgatccggccgttgaggtgctgcagtcgtacgtcgctggcgcgcttttcgatgggtacgcggtagtcgcggttgaagctttttacgtcacccagccagcccggcagcaggaagtggaacaacgaccacagctcacccaggtggttttccagcggcgtaccgctcaggcacaggcgctgccgcgcattcagttcgcgtgccgcctgggccgccttgctggacgggtttttgatgtactgggcttcatcgaggatcagcacatgcaggggcagcgccttgagctgttcgatgtccttgggcagcaaggcgtaggtggtcagcagcaggtcgtagtcctgcaggttcgcaaaatgtttcttgcgagctgcgccgtacagcgccaacaccttgagttgcggcgtgaagtgcgctgcttcatccagccaattggggatcagactggtgggcatcaccaccatacaggggcgatccaggcgcccggcgtttttttcgctgagaatatgcgccagggtctgtaaggtcttgcccagccccatgtcatccgcaagtatcccgcctacatcgagctggcgcagcgactgcatccaactcaagccttccagttggtacggacgcaaggtcgcgttcagcccttcgggcgccacgcaggtgaaatccttgatgtcccgcaggcgttgggcgaagttgcggattttttcgccaccttcccattgcagcggcaggtcttccagcgggttaaggcgaatcgcatcggccttggccaggcgcagcgtggtggcgccggcttcctgtagataaaactcaccgagggtggccagcaccggtttcagtcggccataaggcagcgccacttgtatcgggccgtggccattgggcaggccagggatattcaccaggatcagctcatcatcgcggcgccgcgccagtttctccgggttgaggatctcggtgtgggagcgcatcaggttcagcagaatcggcaacaggctcaggcgctcgccgttgacgatgatccccagctccaggtcgaaccagtcgcgctccggcccttcatcaaccgtggcataccagtcatcgacggcgctcaggtcgaagccgaaatcatcatcgatcagcagctcccagccctcggcccgcaaggtcggcgtggcattgagggtgaaggtcagccaggcactgtcattgaccatctcgaacaactcgccggcgctttccggcagggccttgctctggcgcgtggcgatcttgaaacccagcaggcgcagttgctcgcggtacggctgttccagctcgggatggcgcttgatgcgcaggctctgggtgtcctggcgcacgatgatgtcggcgtttttctgcccgctgacatagttgcccaaataattgaacgacagcgccgcccgatgctggatatagcgctgcatcttgccgttgcgtggttcgaacgcgctgaactcaacactggccatccacaggcgcggcaccggcaccacatcttccatgaccacctgcggcaacaccgcgcggttttccaggactgcctggagcttttccagcagctctgcatcctgggcggcagcggggaaggccagggtttcctggaccttgagcagtaccgccgcgatgtgtttgcagttggtgtgcaccgggcaagtgcagcggctgtccaccagaatcaacgtgcccttggccgattcgcgcagcgaaatggtctgccggtagacgttgccgcctgagccttcgcaactggcgatgatggtgctgtcgccggattcgacgatgcgcacccggttctccagggcataacgccgcccgcgctcaaggctctgctctttaaagcgattggcccacgaaggggccaggggtttggtcagcgacgacgtcaggggcatggcgttggatcagtcctggaggtcgggcggtggtgcgctgggtggcttggcggtcagcgaggtgattttgatcagcaacgccaggtggccgccgtccaggtagttgagctggttgttcttggtgcgcacgtcggtctggctcaggtgttcgctggcgatcacgctgccgttggcatcaaactggttgatccagaagttcgcgtcgatatcagtaaagcgccccagttgcaggttcagcacgccctcgatggggaactgcccgaactgctcctggccgtcggtgatggcgactttgacaggctgctcgcccaggttctgttcccaggccttatgcagcagcaccgtgtaggtggagtcggcgcgcagcttatcgacaatgttggacaggcgcggcgggctcagccgatcgcccaggcgcgcagcgccagcatcccagttttccggagcggcacggctgttgatcaccggttcggcgttctggcgcaccaggatcatttccacctggtacgggctgtcggcgaacgccgcaggtgccacgaccaccaacaacaggctcaacatgcggaacaggcgcattcgggcgtccttcaagcaggtttcgggatgaggcgctcgaacaacgcctccaaggtattaaagcgttcttcggcacgttccatcggcaccatgaacttgaacagcgtagccccttcgaacttgtagcggttgggctggccctggatcagcttgatcagcaccaacgggtccacgggggtctgcgcctcgaattcaatgcgcccaccctgcggcccggcgtcgaccttcttgatccccagttgctcggcctgcaatttgagcagggtcaggcgcaccaggttcttggtcggctccggcaacaggccgaagcggtcgatcatctccacctgcaggtccttgaggccttcttcgtcggtggccgaggcgatgcgcttgtacaggatcagccgtgcgtgcacatccggcaggtagtcctcgggaatcaacgccggcaagcgcaggttgatctccggaccgccgcccaatggttgatcgaggttcggttgctcgcccttgcggatggcttttaccgctcgctcgagcatctccatatacagcgtgaaacccaccgcctggatctgcccgctctggccatcgcccagcagttcgccggcgccacggatttccaggtcgttggtggccagtacaaaaccggcgcccaggtcctgggtgttggcgatcgcttccaggcgtttttccgcatcgccggtgatttgctggcgcggtggtgtcagcagataggcataggcctggtggtgactgcgcccgacgcggccgcgtaattggtgaagctgcgccaggccgaacttgtcggcgcgctcgatgatgatggtgttggcgctcggcacgtcgatgccagtctcgatgatggtcgaggcgatcagcacgttgaagcgcttgtggtagaagtcgctcatcacctgttcgagttcgcgctcgcgcatttgcccatggccgatggcgatacgcgcctccggcaccagctcggccaggtcggcggcgcatttttcgatggtcttcacgtcgttgtgcaggtaatacacctgcccgccgcgcagcagttcgcgcagcagtgcttccttgaccgtgctcttgttctgctccatcacgaaggtgcgcaccgacaaacgacgcgccggcggcgtggcgatgatcgacaggtcgcgcatgcccgacaccgccatgttcagcgtgcgcggaatcggcgtggcggtgagagtgaggatgtcgacttcgctgcgcagggccttgagctgttctttctggcgcacaccaaagcggtgttcttcgtcgatgatcaccaggcccaggttcttgatcttcacatcatccgacagcagcttgtgcgtgccgatcacgatgtcgatcttgccttcggccagatcggcgacggcggcgctcacttccttggccgacttgaagcggctcatcacttcgacagtcaccggccaatcggcaaagcggtcgcggaagctgttgtagtgctgttgggcgagcagggtggtgggcaccaggattgccacttgtttgccgccatgcaccgcaataaaggcggcgcgcatcgccacttcggtcttgccgaagcccacatcgccgcagaccaggcggtccatcggcttgggcgcgagcatgtcggcgcgcactgcttcgatggtggtttgctggtccggggtttcttcgaaggcgaagccggcgctgaaagtggcgtagtcggctttcgggtcggcgaacgcgtaaccctctcgggcggcgcgacgtgcatagatgtcgagcagctcggcggcgacgtcgcgcacctgttcggcggccttgcgcttggctttctgccaggtttcggagcccaggcgatgcaacggcgccagggcgtcgtcgctgccggtgtagcgggcgatcaggtgcaggctggctaccggcacatagagcttggcgccttcggcgtattccatggtgaggaattcggcggcctggttgtcgatctccagagtctgcaggcccaggtaacggccgacgccatggtcgatatgcaccaccggcgcgccttcacgcagctcggtcaggttcttgatcaccgcgtcgttgttggcgtcggcgcgtttttcacggcggcggcgctgcatcacgcgttggccgaacagcgggctttcggcaatcaatgccaacgctggatcgtccagcagcaggccttcgtccagtggtgcgatggtgatcgccaggcggtctttgctcgccacaaaatccggccagctgtcgacggtcttggggcgcagcttcaggcgttcgagcagttccagcagtacttcgcggcggccggcagactcggcggtaaacagcacgcggcctgggaagtcgccgaggaagttggacagcgcatccagcggttgcgtggctttggcctggatcgccaggtcgggcaacgtgcccgcggggaagcgttcgcgaccgacaccggtgtcgacctcctgctggctagcgaccacgcgcggccagtttttcaggcgtgcgaagcagtcttccaccggcaggaacagctcggcgggcggcaataaaggacgggatgggtcgacgcggcgttcttcataacggttacgcacgtcgttccagaagttttccgctgcttgctcgatacctggcagcgagaacacttgggtgtcctggggcaggtaatcaaacagggtggaggtttcgtcgaagaacagcggcaggtagtactcgataccggccggtgtaatcccgctgctcaggtcctggaagatcgggcagcggcggaagtccacgtcgaagcgttcacgaaagcgcgccttgaagcgggtgaccgcgtctttttgcagcgggaattcccgtgccggcagcagcttgatcgagtccactttgtcgatggagcgctggttctcggggtcgaaggtacgcagggtctcgatttcgtcatcgaacaggtcgatgcgatagggcagtttgctgcccatcgggaacaggtcgatcaacgcaccgcgcaccgcgaactcaccgtgctcgtacaccgtgtcgacgcaacggtagccgctggcttccaggcgcgtgcgcatctgttctacatcgagcttctggccgacatccagcaccaggctgctgcccagcaggaacttggtcggcgccaggcgatgcagtgccgttgttatcggcaccaccaacacgccgtgggccagttccggcaggcggtacagactggcgatgcgctgggagatgatgtcctggtgcggcgagaacaggtcgtagggcagggtttcccagtcggggaaatgcagcaccggcaaatcgggggcgaagaagctcagctcctgctccaaccgttcggcgctttggctgtcggcggtgagcagcagggtaaagcgcttggctgcgctggcagcctcggcgatagccaggctcagggcggcaccgggcaggttgccccagtgctgtttacctgcttcggcagggagtagcggtagacgcagaacgggcacggaaggttgagctccaagcgttgcgacaaagtcggtaattgtaacggcccgaggtgccgcctgtcagtttctgactgagcctattacggtttgtaggaaatgtggtggctaagacaaacaatggcgtgttttgactcaatatgtagtgccgaaatacgcgattgtttaggagggttacggacaagtcggccagttctcccaactggtggccttctggaacccgcgtatttactgggctgtagcggggcggtattttttggcaaggggtttttgttgtggggcgcgcattgctccgagggcggtcgggcggcataatgtagccccttttttcagcccctacatgtggaaggttcccgtgactcagaagcccgaccagtgtcttggtgaatggatcgaccgtgaagcactcgcagaagcgatgatcccgcttatcggtcagctgtaccgcaataacaatgtggtgagctcgatctatggccgcagcctgatcaaccagtccgtcatcgcgattctcaaagcgcaccgctttgcacgccatcgctctgccgacgacagcgaactctccgtccacgaaacattcccactgcttaaagccatgagcgagctcaagctcggcgcggcctcggtagacctgggcaagctggcctacaaattccgcaaggaaggcgccggccgtaccgccgagcagttcgtgcgtgaagaaatggccgatgtggttggccagcaaaacgccgcggcccgcaaaggcaccgacgtggtgctgtacggcttcggtcgcatcggccgcctgctggcgcgcatcctgatcgaaaaaaccggtggcggcgacggcctgcgcctgcgggccatcgtggtgcgcaaaggcgccgagaacgacctgaccaagcgtgccagcctgctgcgtcgcgattcggtacacggtccgttcaacggcaccatcgtcatcgacgaagaaaacaacaccatcaccgccaacggtaacctgatacaggtgatctacgcgaagaacccgtccgaggtggattacacccagtacggcatcaaggacgccctgctggtggacaacaccggtgtatggcgtgacgccgagggcctgggccagcacctggcctgcccgggcatcgaccgcgttgtgttgaccgcgcctggcaagggcaagctgaagaacatagttcacggcatcaaccacgctgaaatcaccgctgacgacaagatcgtgtccgccgcgtcctgcaccaccaacgccatcgtgccggtgctgaaggcggtgaatgacaagttcggcatcgtcaacggccacgttgaaaccgttcactcgtacaccaacgaccagaacctgatcgacaacttccacaagggcgatcgccgtggccgtagcgccgcgttgaacatggtgatcaccgagactggtgcggccaccgctgcagccaaggcattgcctgagctggccggcaagctgaccggtaacgcgatccgcgtgccgacgccaaacgtgtcgatggccatcctcaacctgaaccttgagaaagccgccacccgtgaagagatgaacgagtacctgcgctacatggcgttgcactcggatctgcacaagcagatcgacttcgtcaactcgcaggaagtggtctccaccgacttcgtgggctcgcgccacgccggtgtggtggacgccgaggcgaccattacccaggacaaccgcgttgtcctgtacgtgtggtacgacaacgagttcggctacagctgccaggtggttcgcgtgatggaagacatggctggggtcaacccgccagcgtttccgcgctaagcacccgcgttgaataaaaaagccccgactggttcggggtttttttgtgcctggggattttgtgctggctggaagggcctcatcgggggcaagccccctcccacatttaaactgcattcctgcagggttaatgcggtccagtgtgggagggggcttgccctcgatggcgtcagttcagacaatacatgtctttattccagcaacctctccgacaagcccttgggcgctaaccagatccccaggtaagccctcgccagctcatcgtcgttgctgctgaacagcacttccccattgatctccaggttcaagccgcgtccgggtcgaaaatccagtgcgtagcgatcaccgctatgaatgttgcgaaagacggcatgcagtttgtccacttcgggtttcaagcggtcgctgacgtgctggcgctccagcgtggtattggcggccttgatcacatcattgcgatcaatatcgcgaaagtaatacagctccaggcgcagcgtcttttgctgtttccaggctgactctgcgggagtgtcggctggggcatacagcgccgcggcgtatacatcggcccaaagataggtcagtactgcctggtttttcagtgccaattcatgagactgcggggggaaacctgcctgcttgagtcgggcgacttcattggcttgcaccgtgaacgaaaacatcagtaataaacagaaagcgacatgccgcataatggctcgtcctgcaaaggtgcgtgccgacagtgtaattgcaatttcctgagcgtgtagtagaggcaatactggcctacgacgcgaccaagggttaatgtgcgcggcgttgagccttatatagactgtgccccggttcacacacttgagccaaattgtccttcatgaccgctggcgcggcatgatttagcccggcgtccaaccgtacgcctggcctgttctgaggagtacgcatggctgtctacaactacgacgtggtggtactgggttccggcccggctggagaaggtgcggcgatgaacgctgccaaagctgggcgcaaggtggcgatggtcgatagccgtcgccaggtcggcggtaactgcacccacctgggtaccatcccgtccaaggcgttgcgtcactccgtgcgccagatcatgcaattcaacaccaacccgatgttccgggccattggtgagccacgctggttctcgttcccggacgtgctcaaaagcgccgagaaagtcatctccaagcaagtcgcctcgcgcaccggctactacgcccgtaaccgcgtcgacctgttcttcggcaccggcagctttgccgacgagcaaaccatcgaagtggtctgccccaacggcgtggtcgagaagctggtggccaagcacattatcatcgccaccggttcgcgcccgtatcgcccggcggacatcgatttccaccacccgcgcatctacgatagcgacaccatcctgagcctgggccacaccccgcgcaaactgatcatctacggcgccggcgtgatcggctgtgaatacgcatcgatcttcagcggcctgggcgtactggtggaactggtggacaaccgcgaccagttgctgagcttcctcgactcggaaatctcccaggcgttgagctaccacttcagcaacaacaacatcacggtgcgccacaacgaagagtacgagcgcgtcgaaggcctggacaacggcgtgatcctgcacctcaagtccggcaagaagatcaaggccgacgccttgctgtggtgcaacggccgtaccggcaacaccgacaagctgggcatggaaaacatcggggtcaaggtcaacagccgtggccagatcgaggtggacgagaactaccgcacctgcgtgccgaacatctacggcgccggtgacgtgatcggctggccaagcctggccagtgctgcgcatgaccagggccgttcggccgctggcagcatcgtcgacaatggcagctggcgttatgtgaacgacgtgccgaccgggatctacacgattcccgagatcagctcgatcggcaagaacgagcacgaactgaccaaggccaaggtgccttacgaagtgggcaaggcgttcttcaagagcatggcgcgtgcgcagatcgccggtgagccccaaggcatgctgaagatcctgttccaccgcgaaaccctggaagtcctcggcgtgcattgcttcggctatcaggcgtcggagatcgtgcacatcggccaggcgatcatgaaccagccgggcgagctcaataccctcaagtacttcgtcaacaccacgttcaactacccgaccatggccgaagcctatcgggtagcggcctacgacggcctcaaccggcttttttgagcggctccggccggtggcctgagccggccggggagaccgatttcagtaattcccgagggtggcagtggccaaaccgggaaagtctgtaatcaggctatctacgccgaagtcggcgagcctgcgcatcagcgcgggttcgttgactgtccacacggacacgtgcaagccctggcgctgggctttttccagtcgctcgggggtgcacagcgtccagttcaacgccagaatctcacagccatagttctgcgcgaccttcaacgggtcgagccaggcatattcggcaaccaggccgcgtgacaggtccggggtgagttcaaccgctgctttcagcacttcccgcgaacttgaggtgacggtgactttgtccatcaggccaaagcgcacggccatttcacgaatggccagcaccgtggtggcggcgcgggtgcgtgaggcgcttttgacttccagttgccagtgatcgaagtcgcattgttcgaacagttcttccaggcgtgggatcgggcacggcttgacccagcccgggccgcctttgcgcgcgtccatcttcaccaggtcggctgccgaatactccacgaccttgccgcgccggtcggcggtgcgcttgagggtcgggtcgtggatgaccatcaactcgccatccatggacaggtgcaagtccagttcgcagcggcgtaccccgtgcttgaggcattcctggaagctggtcagggtgttttccggtgcttcgcctttggcaccgcggtggccgtaaatcagggtcacagttgctcctatgcgccaggtctgctggcggggtaatacgaattcaggtgtcttgggcgtcgctctgttcccgcgccaggcgccgttcctgggcctgtttctgcaggatgtaacgcgccagcagctggcgttgggcgtcagtcatggcttcgaattccgtgccgacgtcaaaacctgtgcccttgggatcgcaatgggtgacccgggcgcgcagcagcaggccaagcgcctggggcatcagcaccagcttgaccgccaggtgcgcaccgggcgacaggggcgtggggttttggaagtcgataccgccctcggaaaggatcaccggctgcggtgcgccaacttcatccagcaggccgcgcgccatgatctggctgagcaggtccaggcgtttgttctgtactttgaggaaggcggccaggctgcgatctttctcatttatctggcgcaacaggtgctgggcctcgaattcactcaggtgcagttcactgagcagattgaatagcggcgaatcatccagcaacacttccttgctcgccgcttcgggagcagacaggcttttgatttggagtgcgatcatgtcgtcgatacggtagtattcgcggcgttcttcttcatctaatgtcgacatggcgaaccccaagtagcgttaatggtctgagtgtaaagctgcttaccagaccccgccaccgggacgtcttcttttcctccgaacaagccccgacatgttcagacctctcttcgtatttatcggcacgcgttatacccgtgcaaagcgtcgcaatcattttgtgtcgttcatttccctgacctcgatgatcgggctcgccttgggcgtggtcgtgatgatcgtggtgctgtcggtgatgaatggcttcgatcatgagatgcgcacccgcgtgctgggcatggtgccccacgcgaccatcgagggcgatgcgcccatcagcgactggcaaagcctggcggccaaggtcaagcagaaccccaaggtattggccgttgcgccatttacccagatgcaggggttgctgaccaacgacggcaaggtgcagaagatcctgctcaatggcatcgacccggcccaggaacgtaacgtgtcgatcatcgacaagttcatgttgtcgggcaaactcgatgacctggcgcccggcgagttcggcatcgtgatcggcgacaaggcggcggccaagctcggcgtgagcctgggcgacaagctgaccttcgtcgcgccggaagtcaccgtgaccccggccggcatgttcccgcgcatgaagcgctttaccgtggtcggcaccttccacgtcggcgccggcgagatcgacggctacctcggcctgaccaacctcaccgacctggcgcgcctgcaccgctggcagccggaacaggtgcagggcctgcgcctgaagttcaacgacctgttcgacgcgccgcgcacttcatgggaaatcgcccagcatttgggtgacagccagtactacgcccgcgactggacgcgaacccacggcaacctctaccaggccatccgcatggaaaaagccatgatcggcctgctgttgctgctgatcgtcgccgtggccgccttcaacatcatctccacgctggtgatggtggtgaacgacaagaagggtgatatcgccatcctgcgcaccctcggcgccacaccggggcagatcatggtgatcttcatggtgcagggcaccgtgatcggcgtggtcggcaccttgatcggcacggcggtcggcatcctggcggcgctgaacgtgagtgccgccatcgctggcctcgaaaccctgatcggccacaagtttctcaacgccgacgtctacttcattgactacttgccgtcccaggtgcaggcccaggacgtgttgatggtgggcggcgctgcgttggtcctgagtttccttgccaccctgtatccagcctggcgcgcggcacgtacccagccagcacaggccttacgttatgagtgaatcgggcatgagtgaaaaagcaatcctgagctgccgcaacctgggcaaatcctacgaggaaggcccggagtcggtggtcgtgctgtccaacctgcaacttgagctgcacccgggcgagcgcgtggcgatcgtcggcagttccggttccggtaaaagtaccttgctgaacctgctgggcggcctggatacgccgtcccagggcagcgtgtggctggccggtgaagaactgtcggccctcggtgagaaggcccgtggtcagctgcgcaaccgttcgctcggttttgtgtaccagttccatcacctgttgccggagttcaccgccctggaaaacgtgtgcatgccgctgctgatcggcaagaccgcgatcccggaggcccgccagcgcgccaaggccctgctggagcgcgtcggcctcggtcatcgcctggagcacaaaccggccgaactgtccggcggcgagcgccagcgtgtggcaatcgcccgtgccctggtgaacaacccgggcctggtgatgctcgacgagcctaccggcaaccttgactcccacacggcccagggcatcaaggacttgatgctggaactgagcacccagatgcgcaccgcgttcctggtggtgacccatgacatgagcatggcccgtcagatggaccgcgtgctgcacctgcaggaaggtcatctggtcgccatctgacccgtttcaagcccggtgcttcatgcgccgggctttttcattttttcaggcggtgcaagcgaatgttcagaccgttatcgattttcatcggcacgcgctatacccgcgccaagcgccgcaaccgttttgtctcgtttatctcgatgacctcgatgatcggccttgccctgggtgtgctggcgatgatcgtagtgttgtcggtgatgaacggcttccagcgcgaaatgagctcgcgcatccttggcatggtgccccacgccaccatcgttggtgtgaacccgattgataattggcagcccgtggccgccgctgcgatgaagaatccggaagtcaccgcagcggtaccgttcacacaaatggacggcatgttctcctacaaaggcgcgatgcagccgatcgagatcagcggcatcgacccggcacaggaaggcaaggtgtcgatcgtggcccagcatatcgtgcagggcaaactggatgacctcaaacccggcgaattcggtgtagtggtcggcgaaatcaccgcccggcgttttcgcctgaatgtgggcgacaagctgaccctgatcgtgccggaaatcagcaccgcgccgggtggcatcaccccgcgcatgcagcgcttgaacgtggtggggatcttcaaggtcggtgccgagctggatggctccatggccatgatccatatggccgacgctgccgagatccagcattggcagccgaaccaggtgcaaagcgtgcgcctggcggtgaaagacctgtacgcggcacccaaggtctcggcagacatcgccgccagcctgggcaccgcctacaagcccgatgactggacccacacccagggcagtctgttcagcgcgatgaagatggaaaagaccatgatcggtctgctgttgctgatgatcgtcgccgtggcggcgttcaacatcatcgccaccttgatcatggtggtgaacgacaagggcgcggacattgcgattttgcgcaccattggcgccacgccacggcagatcatggcgatctttatggtgcagggcacggtgatcggcatcgtcggcaccttgatcggcggcgtattgggcgtgatcgcggcgctgaacgtgagtgaactggtgggttggatggagcgggtcaccgggcagcatatcttcagttcggacgtgtattttgtcagtaacctgccttcgcagctgcaaggtggggatgtggtgctgatttgcacggctgggtttgtgctgagctttttggccacgctgtacccggcgtatcgggcggcgaagattgagccggcgcatgcgctgagatattcgtaatattcaagaccgctatcgggggcaagccccctcccacatttcgaatgtattcacaaatcaccctgtgggagggggcttgcccccaatagggccggtacagcttgcatcaatctccagcaggcaactcaatcacaaaccgcgtccaccccgtcccggattcacaataaatcctccctccatgcgcccgcacaatcgactgggtaatcgccagccccaaccctgcatgctcgctgctgccttcgtgccgtgccggatcggcccgatagaagcggtcaaacaaccggggcagcaactcggttggaatgccgtccccggtgttctctactgaaagtttcaccccatcctcgatttgcacacgcacttcgccgcctggcggggtaaagcgcagcgcgttatccagcagattcgacagcgcccgccgcaacattccacggtcgcccatcgtatgggccgtgccctcgcgaaccaggctgatctgcccgtcctccgccagcagcgtgaaaaactccagtaacgcatccacttcatcggccagtgccaaaggctcgcgcttgggcatcagtaggccatgatcggccttggccaggtaaagcatgtcattgaccagttgcgccatccattgcagctcttccaggttgctgtgcagcgcctcgcggtaatcctccagcgggcgtggctgggtgaggatgacctgggtctgagtcagcaggttcgacagcggtgtgcgcagttcgtgggcgatgtcggcggagaacgccgagaggcgctggaacgcatcgtccaggcggccgagcatggcgttgaaggcctgggccagttcggccagttccaccggcatatgttgctggggcaggcgctgggtcagggagtgggccgacacactggcggccacttcgcccatgcgtcgcaatggccgcaacccgctgcgggcagcccaggcgccgagcagggcggtggccagggctgacaagccgacggtgagccagatcagatgctgcatgcgctgcaggaaatgctggtggtgggtgatatcaagcatcagcgtcagttgtggcgagtcgggttggcccgccctcagcggcgcgttgtagacccggtagtcggtgtcggcattttgcaggctgtgcaggccgggggctgcgggcaagtcgacgctgggggcatcgtccagccagcgttggccggcggcggtgatacgcagggtaaggtcgggctggcgcctgagttcggcgcgcagttgcgcctcacgctgggccagggcttccggtgaatcgaccccctgcaaggtactgcgcagcgccaccagcttgctgtcgagctgttgctggtccagctcgatgaagtgcgcttcgctggcgcggttgaacagcacaccggcgatcagcgacaccaccgccgtgcaggcggcaaacagcaacgccaggcggctggccagggacaggcgcttgatcaattgacccgttcctccagcacatagcccatgccgcgcacggtgtggatcagtttgttggggaagttatcgtcgactttcaggcgcaggcggcggatggcgacttcgatgatgttggtgtcgctgtcgaagttcatgtcccatacctgggaggcgatcagtgatttgggcagcacttcgccctggcgccgcagcaacagttccagcagggagaactccttggcggtcaggtcgatgcgctggccgtcccgctcgacgcggcggcggatcaggtccaggcgcaggtcggccagttgcagcgcagtttcctggggcgtgctgccgccccggcgcaataggctgcgcacgcgggccagcagctcggaaaaggcgaacggcttgaccagatagtcgtcggcgcccagttccaggccgtgcacgcggtcttccacggcatcgcgggcggtgaggaacagtacgggaatgtccaggccggcgctgcgcacggcttggaggatctgccagccatcacggcccggcagcatcacatcgaggatcagcaggtcgtagtcgccggtcaatgccaggtgctggccgctggtgccgtcggccaccagttcggtggtaaaccccgcctcggccaggccctggcgcaggtagtggccggttttgggttggtcttcgacgatcagcagtttcatgggcggctcttggcaacggtggacgacggctttataccttgggtgccagggcaggagggcaacctgacaaagttgtaatctagcagtcagctggctggcagcggcgcattcttagagtgctccccaggcgagtcacacatttttggagaaaaccgatggcgttgcgtacacccttgttgttggccggttgcctgttggcgttgagtgttgaggcgatggccgatggcgctcatacctatgcgttcggcgaggcggcgccggcgagcaaagccacgcgtactgtggaagtgaccctgcaggacatttccttttcgcccaagtccctggatgtcaaagccggtgagacggtgcgctttgtactggtcaacaaagggcagttgctccacgaattcaacctgggcgacgcggcgatgcatgccgagcaccagaaggaaatgctacagatgcaggccagcggcatgctcacctctaccggcatgggcaatatggaccacaacgccatgggccatggtgcgatgaaacacgacgatcccaatagcgtattggtcgagccgggtaaaactgcggagctgacctggacgttcaccaaggccacaggcctggagtttgcctgcaacctgccggggcattaccaggcgggcatggtcggcaagctcaacgtcgattgatccgctggcgcttaggcgcgggggcaaaggctggtagactggcgtggtttatttagccaggtttccgccatgcatcccgcagccgaacattcgccgctgggcaagtccagtgaatacatctccacctacaccccgtctttgctgttcccgatcccgcgtgccgccaaatgggccgagctgggcctgagcgccgagaccctgccgtacaagggcgtggatttctggaactgcttcgaattgtcctggctgctgccgtcgggcaagccggtggtggccatcggcgaattcagcatcccggccgactcgccgaacatcatcgagtcaaagtcgttcaagctgtacctcaactcgctgaaccagaccgcgtttgccgatgcggccagcctggaagccaccctgcgcaccgacctcagcgccgctgccggtaaaccggtgagcgtacgcatccgcagcctggccgagatcgaggccgagggcgtgatggccttgcccggtgtgtgcatcgatgacctggatatccgcgtcagcaactacgaacacccgcgcccggaactgctgcgttgcgatgattcgcgcgttgtcgaagaaagcgtgcacagccacctgctcaaatccaactgcccggtcaccagccagcccgactggggcagcgtggtggtggagtaccgtggtcacgcgttggaccacgccagcctgctcgagtacatcgtgagctttcgccagcactctgacttccatgagcaatgcgtggagcgcatcttcctggacttgcagcgcctgctgaagccggaaaaattgacggtgtatgcgcgctatgtgcgacggggtgggttggatatcaacccgtatcgcagtactgaggatgtggcgttccagaacgttcgcctggcccgtcagtaggcttattgcaagataaatgtgggagggtgcttgcccctcccacatgtcgggcagattagatccccatgctgcccagcgtattcatgatattgcgcaaggtgccggaaatcaccgggtgctcggcgtcgaactcgatggccgcttgattcacatcgtcggaaatgctgggtgtctgggtggccggttccagttcaagttgcaattcaaacttggcaatcaaggcttccagcgctgtgcgcttttcttccgacagcggcggttcctgttccaactgcccgcgcaggatctcgacctgttcttccagttttttgcgatcaggcatgacgtgtttccttttatcgataggcactggcatagaccacggcacgccgcgaaaggtctacgggctgacctgtagattaatccaccggcgccctcagtgcatgatctctatcagggcttctcgcctttgaggcgccgtaagctgatatctgccaggcaggtgcccaattcaccgaggtgatcgatcaccgagtgcacacccaacccatacaacgccacggtggccttgccacgtttgtgctcgcgttgctgctcggtcagtgcttgccactgctcgggggccagcccgcacagcgagccgcacgaagccaggccgatggtccacaagccggcattcaggcctgactgcaacagacgcggctcgccgctgaccaatacacagccttccaggcgttcgatgttcaattccatcagggcttgccagcacgcgtgcggggcgggccagcgaatggaggagggtgatgtcgccttgacccagttgggtagcgtggcggccagcggtgtggtgacagcgggggggagttcatccagccaggcgcagggcacgccttgttccttgaggctgcgcaggattttcagcgcgccggtagtggcttgggagtcgggtgcgggggaatcggtgcgtgccctggaaccgaaatccaccaagcagccactcaggccaaacagaacggcagtcaaggcgggggtgctggcgatggctatctcggcgtgaggcatgtcgacatccctgaaatagcgctaacgctatccaggcaccatgacaggccgatgacagccgggataattgtaggaattttgtccatttttggtctgacgtttcctagttactgcctaattggcgacttccgtcatatactgacgtccttattcagggcatagcgcccatgacagaccattcaaggagcaaaagctatgcgctggagccactacttcgctcagctgtcagtgtgtgccactgtcctgctggcgccgttcgccgcacaggcagcatcggaagacgatccatgggaaagcgtcaaccgtccgatcttcactttcaacgacaccgttgacacttacgcgctcaagccattggcccagggttaccagttcgtgactccgcaattcgtccaggatggcgttcacaacttcttccgcaacatcggcgatgtcggcaacctggccaacaacgtgctgcagctcaagccccaaaaggccggtgtagatacggcccgtttgctggtcaacaccaccttcggcgtgttgggcttcatcgatgtaggcaccaaaatggggctgcaacgcagtgatgaagacttcggccagaccctcggttactggggtgtcggcagcggcccttacgtaatgctgccgctgctgggcccgagcaccttgcgtgacgcgccgtccaagtacgtggacagctacacccagccttaccgctacatgaacgatatcggctggcgcaacagcaccttcggcctgaatatcgttgatacccgtgccagcctgctcgacagcgagaagctgatcaccggtgacaagtacacctttattcgtaatgcgtacctgcagaaccgcgagttcaaggtcaaggacggcaaggtcgtcgacgacttttaagccgtgatgttttgaaatgaaaaaggcgacccatgtggtcgccttttttgtgcgcggttttcagcgcattttcaggatcctgagacccaggtgctggtcttcgccggtggttttggtccacaccacctcggtgtccgcctccaggcccttcagcgcggcgtgctccgagtcgatgcgtacggtcaacaggtcgcccgtgttgaactggcgcggcgcctgcacctgcatgccagagctggaaaggtccacgcaaaccccggcaatctcttgccctgcatggatcagagacacatcggcatccacacgcatgcggatgaaatcgcgtttttcggcgtagtcgcgctcgtgttcgctcatgggctccatccttactttgtgttgtggtcgtgcctgttcttataactcccggtgatttgcggtgtaaagacgcccggcgaccatcggcatgagcttgaaacccctgacggatgggagtaccgtctgcgccttagaagggcacctctgctttacctttgtgcatgggaaaaatcccaatgctttgtaggacagagaggctagaaagcgaatccagtacgtgagcccggccattgtcgcgccacctacgccaacctaattctggcgccgtttgcccacatgcaaaaaaccagtgccacgctgctgataatcgatgacgacgaagtagtgcgcgcgagcctcgcggcctatttggaagacagtgggttcagcgtcctgcaggccagcaatggccaacagggtctccaggtgttcgagcgcgaccagcccgacctcgtgatctgcgacttgcgcatgcctcagatgggcggcctggagctgattcgacaggtgaccgagctcgccccgcagacgccagtgattgtcgtatccggcgccggcgtgatgaacgatgccgtcgaggcgttgcgcctgggcgctgccgattacctgatcaagcccctggaagacctggccgtgctggagcactcggtgcgccgtgcgctggaccgggctcgcctgctgctggaaaaccagcgctaccgcgaaaagctcgaaaccgccaaccgcgaacttgaagccagcctcaacctgctccaggaagaccagaatgccggtcgccaggtacagatgaacatgctgccggtcagcccgtggaccatcgacgaattccagttcgcccaccagatcatcccgtcgctgtacctgtcgggtgatttcgtcgactattttcgcgtcgacgagcggcgtgttgcattctatctggccgatgtgtccggccacggtgcttcctcggcttttgtcaccgtgttgttgaagttcatgaccacacggttgctgttcgaatccaagcgcaatggcaccttgcccgagttcaccccctccgaggtgctgggccacatcaaccggggcctgatcagctgcaagctgggcaagcacgtgacgatggtcggcggcgtgatcgatgaagaaaccggtcttttgacctacagtatcggcggtcacctgccgatgcctgttttatacactcctgacagtgtgcgttacctggaagggcgtggtctgccggtgggcttgttcaatgaagccacctacgaagaccacatcctggaactgccgccgaccttcagcctgacgctgatgtccgacggcattctggacctgcttccagagcctacactcaaagagaaagaagccgccttgccccaaaaggtcaagtcggcgggcggcagcctggatggcctgcggcaggtttttggattggccacgctaggggagatgccggatgatatcgccctattggtgttgagcaggaatctttgatgagtaccggaagaatccaattcgccgagcaagacgggaccttcgtcctgaagtttgtcggtgaagtgcgcctgaccttgtgttcggcgctggatgcgacgattgagcggatcttcacagcgctgaacttctcggcgatcgtgatcgatctgaccgaaacccgcagcatcgatagcaccaccttgggcctgttggccaagttgtccattctgtctcggcagaaggtcggcctgttgccgaccgtcgtcaccacccacgaagacatcacccgcctgttgcagtccatgggctttgatcaggtgttcaacatcgttgaccgcccaatcccatgcccggaatgcctgaccgacctgccgtcccaggaccagtccgaggaagtcgtgcgggtcaaggtgctggaagcgcacaagatcctgatgggcttgaacgattccaaccgcgaagcctttcacgacctcgtcaacgccctcgagcgccactgaccgcattccaactgtgggagggggcttgcccccgattgctgagggtcaatcacaacatctgtgcctgacacactgctatcgggggcaagccccctcccacattgaatctagataggcttcagatctactgagcgtaaaaaagggcggcacccgcgaggg

SEQ ID NO: 72 - DNA, 289420 bp, Pseudomonas nodulensis
  misc_feature (272700)..(272764): n is a, c, g, or t
ggcacccgcgagggtgccgccctttttgtcgccgtctgccttacaacttggcagtcagcaacgcctccagcttctcctggtcccgagcaaactgacgaatcccctccgccagcttctcagtcgccatcgcatcctcgttggactcccaacggaactgcgcttcagtcagatgcacgcgcgcttcaccggcatgcccaggcgataacttgcgctccagcttgccttcatccgccgccagcttctccagcaggtccgggctgatggtcaggcgatcacagcctgccagctcttcgatctggctcaggttacggaagctcgcacccatcaccacggtcttgtagccgttggccttgtagtagttgtagatgcgggtcaccgactgcacgcccggatcttcggcaccggtgtagtcgttgccgttggccttcttgtaccaatcatagatacggcccacgaacggcgaaatcaggaacaccccggcttcggcacaggctacggcctgggcgaaggagaacagcagcgtcaggttggtctggatgccttctttttccagcttctccgccgcgcggatgccttcccaggtggaggcgatcttgatcagcacacggtcacggccaacgccggccttctcgtacaggtcgatcaggcgatgcgcacgcttgagaatggcggcttcatcgaacgacagacgggcgtccacctcagtggaaatacgacccggcaccactttgagaatctcttgacccaccgccaccgcaaaacggtcgctggccaggcccacatcgccattgcagtcctgtacggcttcatccagcagcttggcataagccgggatcgacgccgccttgagcagcagggaagggttggtggtggcatcctgcggcttgagcttggcgagggtggaaaaatcgccggtatcggctacaacagtggtgaattgcttgagttgttccagcttggaagtcatgggcgtgctctgtcctgtgggtctgatgacattacccgagcaccggcaggcgctcaagggcgcaaatgcgttcgatcgtttgcgagggcaacaacctgaaaacggccgtttgaatgccttgtcttggtgctaaataggaggccaaaaccgccggcaggttcaactcaattaccgaacgaccaccacaattcaaaggtgggaggggcttgcccccgatagcgacagaccagtctccccggacccgaactggccctcaccgcccttccagcaaagccccagcctgatccagcaacgccaacggatcactcgccttatgaatatccaccgacaacaactgcctgaacttgcgcgcccccggaaaaccagtgcccaaccccagaatatgccgagtgatatggtgcatcgaaccaccactggccaaatgctccgcaatatacggccgcaactgcaccagcgcctcagcccgactgatcaccggcgcctcactgccaaacaactgctgatccacctccgccagcagatacggattgtgataagcctcccgacccagcatcaccccatcaaacacctgcaaatgcgcctggcactgctccagcgtcttgattccgccgttgagcacaatctccagctccggaaagtcctgcttcaactgcgccgccacgtcataacgcaacggcggaatgtcacggttctccttcggcgacaacccttccagaatcgcaatccgcgcatgcacggtaaaactggtgcaccccgcgtccttcaccgtcccgacgaaatcacacagctcggcgtagctgtcccggccattgataccgatgcggtgcttcaccgtcaccggaatcgacaccgcgtcacgcatcgccttcacacaatcggcaaccagggcaggatgagccatcaggatcgcgccgatcatattgttctgcacccggtcgctggggcagccgacgttcaggttcacctcgtcgtagccggcggtttcggccatacgcgcgcaagccgccaaatcagccggaacactaccgcccaactgaagggccagcgggtgctcggcttcattgtggcgcaggaaacggtcgtggtcgccgtgcaggatcgcgccggtggtgaccatctcggtgtagagcagcgcgtgcttggagagcaggcgcaggaagtagcggcagtggcggtcggtccaatccatcatcggggcgacggagaagcggcgggagagggcttgcgatggagctatgactgaaggcattggagtcttggatggagaatgcgaaggacgggcagtttatcaggaatgggtcggagggggctgggtgttgatcgtcgtgtcgcgagaaccaatattgaataaatccgtcccttttttcccataggagggataggcgtaataggtgattgcatattgagatcacgggctaaaaagagtaggttgctttgcaacgctgaagcttcttaacgttgttgaaggactgtattgtgaaaggaatcaagccgtttttagtgttgcgatactcgctgatcgaaaataagcaaggtgcccttgttccttccccgttacctaaacctaagggcgcggttgttgtagcggccctccaggatgacggtcgtgagtttgttaaaaacaaagttcgttatagttttgtggggttctcgtatgctgaacccaccgctaacgaatttcctaaagacaggtttttggtgggaaagactgctaagcataagttaactaaagttggtgataaggttcctggtgatatagttgcccacgacgctgatgattgggttccagtcattactgtggttgatactgtggatcagtatatttttgtgcagcatgattggcgatttggtacggatgaacaaattgcaaacgcaattcaagcagggcttagggatcctgtcttgaatgagtttaattattcaatatttattgagcctaagactattaggggtgaattttggaatgttgttaggtctcatagaaagatttttgaaattgagcttgaactcatctctccaaatattttagaaactaacataaaggctcgtgatgctctgagggcaatgaaggagctcttcggtcaggatgaggtgaagatcttactgagcaatgagtttggagatctcaaagttccggcttcccctgtagaagactatattgattatattgaggaaggggaaggtaaatggagtgtaacaactgagggcgattacaacggtaagcaagtacataaaagtacatctgccattgtgaaaattgatttaaatgtgccttctgatgatgtggtaatgcaagagaatcaattggaacttgaaactgggcagccggccccaggtcgttctcttcacgatgctcgaatggtggctgaagtgtattctgctataggtgatttgttgaggcgttagcatgattcgcctaatatttattttcattgcatctttcaccctttgttacctgtcgctatgggggacggggggagcggtgagcccactattcagtaatgtaaattcggttttgttcgttttaggcgcgctgtttggtgctctttcgttagctttctttaactatgttgagggtgttatgaaagatgttccgaaaaaattgaagcagcaaaaacctacagcttatgcaatagttgttgatactttgacgaatttgaagcgtgaggttatcgttaatgtcgttttggtagttatttttttaatggttgcattcgtattgggtgcaatgattgaaatggcatttatgcaaatgttagagatgtcaaagttttgggtgtggtcagtcttgtcggttcgcggagcttgtctttttagtgttctagtggtggtgtttgtccagttgtcggggttcgtgacagcgaacaatttacgggctgaaatttccatgtatggtgagtaacgtcttgtggtttttcacagtcttaaaatcgcgggtcttatgctaaatctcgcgcgctgctcaccctattagtcgactttgctcccgggtagatttttcacgctgatagtcgatgatagtgcgcacaccacaatatcctgttcgcagtccactatgtttttaaggagttttcccacacttatctcggcttgcccctcagaccacccatcgctaacctccgcaagtcgctgcaaacccagcgaccggaggtggaagtccgtattgctaaggcgttttaactcccggaaatatttggagcttcgcccatgcctaacaaatcacgcagtccttatgtcggtcaagacagtgctcccgccgaaaacccagccggcaacttgttcctcgtcagccccaacatcgacaccgaaaccctcctggccaacgccgccgaaaacctcgcatccgcgaaccaaatggccgccaatctggccttcgacctcgatgacccgcaccgcgccatcgtcctgggcctccaacaactcatcgatctaagtgctctactcatcgaccgagtccaggaacacgtcgcacctgccgcctgtaaggccaccgcctgacacccaaccccgccgccttaccccaaggcggcaacctgaacccatcctgtcacccagcaaagtttcatcatccccggcgcttttgaggtctacgatcctcttcaagagaggacctccgcgcctccattccacagggaactgaaaccatgatctcgaacctcgttaaagtcgtgatggttgctggcacgttgctgttgggcgcttgttcgacagggtcggccggcgtgagcagtgacccgtgtttttcaggcggatgccaggcgtttggggaccatagccccagcaaagccgccaagatgaattttggcggcagtgggctggggagtagttatggggagtatgggtcagggttgttgcatgatgattgatggggtggtggggcagtcattgggggggtgactgacccattgccatcgggggcaagccccctcccacattggagctgtgatcggcgcaaaaccgggggcgtcagtgcccccccttcatgcggcgggcgatgaggtagatgcccaggccgatcagcgctgtagcggcgccgatatagccggtgctggtccagccgtacccggctgtaatcgccatcccgcctagccacggccccagcgcgttcgccaggttgaacgccgcgtggttcgacgccgccgccaggctcggggcttcgtgggcgatgtccatcaagcggatttgcaggggggccgccatggcgatcatggtgccgaccaggccaatgcccagcagtacgctccacagcgaactggcggcgaaggtgaagaagatcagcacggccatcgaccacaccatgatccagcccacggcgcgaaattgcaggcggtcgaacaacttgccgccggcgatgttgccgatgatgccgcctgccccaaacgcggcgaggccgaagggaatccactgcggcgagactttggtcacttccagcatggtcggcgccaaatagctgaacacgcagaacatcccggcaaacccgatcgcgccaatcgacaacgccatccacacctgcggcttagtgaaggcgcgcagttccttgcgcgggtcgctgcgttgttcgtcatggcggtggggcacgaattgccagaccagtgcgatggtgcacagggcaatcacgctgaccagtgcaaacgccgagcgccagcctaggtgttggccgaggaaggtggcgatggggttgccgagcagcatggccagggtcaggcccatcattacgcgggccacggcgccggcgcgtttgtcgttggggaccatgctcgaggcgaccacggcggcgatgccgaagtaggcgccgtggggcaggccgctgataaagcggaaggccaccagcgagccgaaggtcggggtgaaggcggtggccaggttgcccaaggcgtacaggcccatcagtagcaacagcatgtgtttgcgtagtagcttggcgccaagaatggccagcagtggcgcgccaaccatcacgcccagggcgtaggcgctgatggcgtggccgacttgcggttcgctcaaattgagattgtgggcgatgtcgggcatcaagcccatgatggcgaattcgccggtgccgatcgcgaaggcgcccacggccatggccgcttccattttggcggcgccgcgcgcgggcagcacatgcccgggtgtttgctggatagtcatgggtaactctggttggatggagcgcacgaaggagagccgccgatgctacgcaagcagcggcaaaggtgtctagaacagcggtttgcgtgagagttccaggcctgtgaccccaggtcgcgcctgccacgcttgacatcgacgggttaaaagctgcgatttagagctgtcaattggccaaacggcgcataaacgccgtttgccgtgatattctgcgcgccgtcctggtctagcatcccctgggtacgtacgtcccagcggttggctgtcgcccaggtagctgaagccaataatgataagaagtcagcgcagaagggacataaacagtgaggtcgatacgtcggccttgtgtgcccaccctgcggccctctcgtgaatgtgcataccccgcggtgctgccttgcgcagctgtgatggagggttgcccatgatcaggggcggtagggcggatggcgttttatcataggtgctactgatgtttaaaaaagtaaacactgccctgctggggctggctttgtcgctggggatcagctccgttcaggcggaagaggcaaagaaagtcgatgtgctgctgattggcggcggcatcatgagtgcaaccctgggtgtctggctcaatgagctggagccgggctggtcgatggagatggtcgagcgcctggatggcgtggccgaagaaagctccaacggctggaacaacgccggtaccggtcactcggccctggctgagctgaactacaccccggaagacaagaacggcaacgttgagatcccgaaagcggtcgagatcaacgaagcgttccagatttcccgtcagttctggtcctggcaggtccgccagggcgtgctgaaggacccgcgttcgttcatcaacaccacaccgcacatgagctttgtgtggggcgatgacaacatcaagttcctgaaaaaacgctacgaagccctgaaggccagcccgctgttcgccggcatgcagtactccgaagacccggcgcagatcgccaagtgggttccgctgatgatggaagggcgtgacccgaaccagaaaatcgcggccacctggagcccgctgggtaccgacatgaacttcggcgagatcacccgccagttcgtcgctcacctgcaaaccacgcctaagttcgacctgaaactgtcgagcgaagtgcaggacatcaccaagaacgccgacggttcgtggcgtgtgagctacaaaaacctgaaagacggcaccaagaccgaaaccgacgccaagttcgtgttcatcggcgccggtggcggtgcactgcacctgctgcagaagtcgggcattcctgaagccaaggaatacgctggcttcccagtgggcggctcgttcctggtgaccgataacccaaccgttgccgagcaacacctggccaaggcctacggcaaggcttcggttggcgcgccaccgatgtcggttccgcacctggacacccgcgtgctggatggcaagcgcgtgatcctgtttggcccattcgcgaccttctcgaccaagttcctgaaagaaggctcgtacctggacctgctgaccagcaccaccacccacaacatctggccaatgaccaaagtcggtattcgtgaatacccactggtcgagtacctcgccggccaactgatgctgtccgatgacgaccgcttcaaggcgctgcaagagtacttcccgaacgccaagcaatccgactggcgcctgtggcaagccggccagcgcgtgcagatcatcaagcgtgacgaagagcagggcggcgtcctgaaactcggcaccgaagtggtcagctccgccgacaacaccatcgcgggcctgttgggtgcatcgccaggcgcgtccaccgcggctccgatcatgctgaccgtgctgcagaaagtgttcaaggacaaggtcgcgactcctgagtggcaggccaaactgcaccagatcgtaccgagctacggcaccaagctgaacgacagcccggaagcggttgccaaggaatgggcctacaccgccgaagtcctgcaactgcctacgccgcctgtgattccacaaatggctgccccaaaggctaccgaggctgccaagcctgcggctgagccaagcaagccggcatctgacctggcgctgtaagccaggctgatgcacaaaagcccgctgaaccggtaacggtcagcgggctttttcatggccgtgagaacagttcagcaacctgacagacgccacctgttaaaaatattccagagccaagcaggagcgaggccgcaacaagggggcattttttaccagtgtcagtgttgggcgcacgcgcccgagggttttttgtatgtggctacgttatgcagcattggcggccatggtcgtcgcggcatccggatgtgtgcaagagcgcgtcgtgcacgagcgcaggccggtgcaacgtgagtatgtggaagtcatcgcgccacaaccgccgccggtgcaggtgatcgaagtcgagccgcccgtgcgctacggctacgtctggtcgcgtggttactggcgctgggacggcgggcgatatgtggctgtacacggccactgggagcctgtacgtgaaggctatcgctatgtgcatccacattgggtgcagcgcaatgatgggtatcactggcagggcggtggctgggttcgctgagccctggtttcatcggcaacgagcgttaaatcggcttctgggtgcccaggagccgaacctcccgcagcaacgcggcgccgagttgatcggtgcccagttcccggtagcccacggcctttacctcgccgttctcctccgcctggataaggatcaccggggtttccttgccggtggtttcgtcgacatgcatcgcgtattgggggatatccagcttgatcggcgtccccgccgccttgcccttcacattgatcaggaaggcggcgcaaccgctgtcgacatccgcagtggtggcggagcggccgctgacaaagcaggtctttggtagatcgggccaggtgatggtgtcggccagggcgagagtgggggccatggccagggcggcgagtagaagcgtgcgcacgtcggtctttctctcgatcaaggtgaaaacggtttgtaccaaagcccgcccgcggccgcaacgccagggttcaggccagccgcttcatgccggtggtcttgatcgcgttgaggtcgaaggttgccgtgtattcgcaaccggcggcgtgggcgcagcgctcgatcaggcagtctgcaaagtcagccttgttcgccacaaacttgcgcagcgcctgccagatgatctccccatgctctacggtcaattcgcgggtgcgcagcagggtctcaagcactatcaccacatcacttttggccgactggtagcagctttgcagtacccacaccagctccacaatggagaccaggctgataaagcccggcgaggcggtggtcagtgattcgatcagctcggatgccttggccgattgcacgggatcatcctgggtgacgtagcgcaccagcacattggtatccagcccgatcatccggcttttgccccctgcgctgcgatggcttggttcatctcttcgatagagatggtcctggcaggcttgcggatcaaccctttgaggtcatgcaccgttttgctcgcggcaatgatggaaaactgcccatcttccatttctacgaattcaactcgatcacctgtttccaggccgagggcggtcctgacctggacaggaatggtgatttgacctttcgaggtcagtgtagcgatagccatgttgaagatctccatcgtgatattccttaccttagggtaaggaatgacagaggacaatatccgttggtccatagggtgctcatctggtgtgggttagtcggaacaggtaaaacactagtcccaactgcccacgcccgctgggcctaaagagatacaaaccatgaccgaccgccacctcgttatccctgcctccatgcaccccatcgtcgagcgcgccggctacgtgcctgcggtcaaggttggcaagacgttgtactgcgccgggcaggtcgggcgtacggctgggttggcggtgatcgaggaccccgcggcgcaattcgtcgcggcctgggacaatctgcggcaggtgctggaagagggcggttgcacgttcgacgatgtggtggacatgaccacttatcatgtggatatgagccagcacatggcggttttccgtgaagtgaaaaaccgcctgtttccacgtgggcattgcgcctggaccacaatcggggtgtccgaactggcgcaccccggcctgctggtggaaatcaaatgtgtggcggtacagcgctagcttattgcaccacgcggtagcacggtacatacgccgcgccgcccggcaacttcatgcggtgctgggcgacgaaggcctgtagcaactcgtccagcggtttcatgatggccgggtcgccgtggatctcatacgggccgttctgctcgatcaggcggatgcccttgtccttcacgttacccgccacgatccccgagaacgcgcggcgcaggttggcggcgagttcatggggcggcagggcgtggctcaattgcaggctggccatgttctcgtgggtggggtcgaacgggcgctggaagccttcgtcgatcttcaacagccagttgaaatggaacgcgtcgttgcgctcgcggcggaaatgcttcaccgccttgaggccggcagtcatctggcgtgccacttccgccgggtcatcaatgatgatctggtagtgcgcctgggccgcttcgcccaaggtggcgccgacgaaggcatgcagttgttgcaggtacggcgcggcgtgtttcggcccggtgaggatgaccgggaacggcaggtcacggttgtccgggtgcatcaggatgcccagcaggtacaggaattcctctgctgtaccggcaccacccgggaagatgatgatgccgtggccgacgcgcacgaacgcttccaggcgcttctcgatgtccggcaaaatcaccagttcgttgacgatggggttcggcgcctcggccgcgatgatgcccggctcggtgaggcccaggtagcgcccgccggtaatccgctgcttggcgtgggaaatggtcgcgcctttcatcggacctttcatcacgccagggccgcaaccggtgcacacgtcaaggctgcgcaggcccagctcgtggccgaccttcttggtgtatttgtattcttcggtattgatcgagtgcccgccccagcacaccacgatcttcggttcgacacccgggcgcagcgtacgggcgttgcgcagcaggtggaacacgtagtcggtaatgccctgggagttgctcaggtcgatgcgctggctgtccagctcgttctcggtgtagacgatgtcgcgcagggcgctgaacagcatctcgcgggtgctggcgatcatttcgccatcgacgaaggcgtcggccggagcgttcagcagttcaaggcgcacgccgcggtcctgttggtggatgcgcacttcaaaatctttgtaggcgtcgaggatggtcttggcgttgtcgatgtgcgcgccggtgttgaggatcgccagggcgcattggcggaacagggtgtagatgctgccggtgccggcttcgctcagttgctggacttcacgttgagacagggtttcgaggctgcccttggggctgacggaggcattgatgacttgacgttggggcattctgattccttgaaagcgcagccaccgcacccgcaaggggccgcgatggcttgagaatgatgggcgccgaattcggtcgcacgagacggttatttacctcacgcgcaaggtcgagcgcaaataccgtccagcaccatcatgccgcagaactcactgaatcagcttccagtttttgtagaaaacccgacgcagggtaaaggccatcccggcaaacccagcgatcacggcattgagcacccgggggatcggcgtcggtcgcacgatatcgataaacaggcagtaacgcttggcgtcgtttttgttgaaagacgcatgcatcaaggtgtcatcgaaaataaacagcgggtcgtcgtgccagtaatgcttgtgctggcccacctggatgtagacgccctcgtgatgcggtgccggggccatgttgtagagcacgcggaacatcatgcgcagcgggccgaagtgaaaggaggtcgagcggttttcattgaacaccgacacaccgatggtcttcacgaacggcagtttttcgcgcagtttcggaatgtccagggtggtctcgatggcttggccgtaccactggaagaacaacatgccgcgtttcttctcggccatgcgctcatccaggtagccgatgatttcgtccttgtgggccatggcatcgttgatcacctgttgcaggtcttcacgccaggcgggtggcaggtcggccatggtgtagacgtggcggttaggcgaactcaacaggtcgaacaaggtgttgaacggggccagcagccaagtgttacggccactgccgataaaatactttttgatcgtcgtgcggtcgtacagcccgttgcgcaaaaagtcatagacaccacacaccagcaccaggcccaggaacaccagggtggtgaccgggaagcaataaataaccagcagcacgccgatgatccaggcggccgagactattttcttgcggttgacactcgcactcatgaaactcaactccaacgggggaaggtgcacgagttccagtcctcatggcacccagagatgcgaagacatgaaacataatgaaacaatctccctatgatagggctttcccccgcagccgggcgttttaaatattgcgaaattgtgaaggctttacacagtttttaaccccggcggcgctgtgtggattggattttgtaaacagaagatttgcgactatcgtgacgcttcggttttttggacgtcatagaccggtacgattgaagttgaatggccaccactggccttcggcaccttggaagaggcagaaattttatgatcatcaaaccgcgggttcgtggcttcatctgtgtgaccgctcaccctgttggctgtgaagcgaacgtcaaggaacagatcgactacgtgacccaacacggcgtcatcgaaggcggcccgaaaaaggtgctggtcctcggtgcttccaccggctacggcctggccgcgcgcatcagtgccgcgtttggttgtggcgccgacaccctgggcgtgttttttgagaaagaaggcgaagaaggcaagctgagctccgccggctggtacaacagcgccgcgttcgagaagtttgccgtcgaaaaaggcctgtacgccaagagcatcaacggcgacgcgttctccgacgagatcaagcgcctgaccatcgacaccatcaagaaagacctcggcaagatcgacctggtcgtctacagcctggccgcgcctcgccgtaccgacccgcaaggcgtggtgcacaactccaccctcaagccgatcggcaaggccgtgaccctgcgcggcatcaacaccgacaaaggcgttgtggtcgacaccaccctggagccagcgacccaggaagaaatcgacggcaccgtcaaagtaatgggtggcgaagattggcagctgtggattgacgccctgcgtgacgccgacgtcctggccgaaggcgccaagaccactgcgttcacctaccttggcgagaagctgacccaggacatctactggaacggctccatcggcgaagccaagaaagacctcgacaagaaagtcctgaccctgcgcgacaacctcgccgcgctcaagggcgacgcccgtgtgtcggtgctcaaggccgtggtcacccaggccagctccgcgatcccgatcatgccgctgtacctgtcgctgctgttcaaagtgatgaaagagcagggcacccacgaaggttgcatcgagcaggtctacggcctgttcaaggacagcctgtacggcagccagcctaaactcgacgccgacggccgcctgcgtgccgacctggccgagctggaaccgaaagtccaggacgccgtggcggccctgtggaaccaggtcaccgacgacaacgtcaacgaaatcagcgattttgccggctacaaggcggagttcctgcgtttgttcggctttgaaatcgacggcgtggactacgaggctgacgtgaatccgaccgtgaagatcaacggcctgattcaggcgtaagtgatccggttcaaaaagacggcccttcggggccgttttttatggccgctgaaaaaggctgccttcagaaccctcttacacatttttgagcagcgtccgatcgctccgatatgccagactccagccgctatcacattcaggctaacggaggatctgatgacgattcgtgcagtggtttttgatttcggcggtgtcctgttcgactggagcccgcagcacctgtaccgcaagctgattgccgacgagcatgagcggcaatggttcctcgataacatctgcacccaggcctggaacaccgagcaggacgccggtcgctccctggccgatggcacccgcagcctgatcgagcaatacccgcatcatgagcgtttgattcaagcctattacgaccgttggcacgagatgctgcgagggccgttgccggaaggtgtggcgatcctcgaagcgttgcaccgagccaatatgccgttgttcgggcttaccaactggtctgccgagacgttcccctatgcgcgggccaattacccgttcctgcagtgttttcgcgacatcgtggtatccggcgagttgaagctgatcaagcctgacgcggcgatctatcacgccagcctcagccaggtacgtgcgcagttgccggatatccagccggctgaagtggtgtttatcgatgacgttgccggcaatatcgaagcggccatcgcactgggctggcaggggattcaccatgtgtctgccgagcgcacggccgcgcagttgcgtgagttgggcgtgggcttctagcgcgcccacttttccatggcgaaatccacgaaggcgcgcagcttgggcaggcgatatcggtcctggccgtagagcagatgcatggggcggctgggcagtcgataggtggtcaacaaggccaccagtttgccgctctccaggtccggttgtaccagggcatcggccagcatgatgatgcccatgccgttgacgcccgcctggcgcaagccttgcgagctgttgatggtcaatgagccggacactggcacttccacctcgccgctatcgtcggtcatgcgccagagtttttcggtgtcgcgccaattgtcatttgccgggtaggcgaacgccaggcagtcatgttgcttgaggtcctcgggtttcgaaggcgtgccgtgtcgtgccaggtacgcaggtgacgcgcagagggtgagggtgtagtcctgcattggccgagcaatcaggctcgatgcttccagttcgcccagacgtatcgccacgtcgaagccgctgtcgaccaagtccatccgctcgttgctcagcaccacgtacaggttgatcagcgggtagcgccgggaaaactcgctcaaggccggtgtaaggcgttcggtgccgaatacggggggcgcagtgatgcgcagggtgcccttggggacatcactatgggcttgttcggccagttgctcggagtcggccaccagccccaatacttccaggcagcgctggtaatactgcccaccaaattccgtgaggctctgtttgcgcgtggtgcgcttgagcaggctgacgcccaggcgttgttccagcgcgcgcaggtggttgccgaccatggtggtcgacatcccgcaggcctgggctgcggcggtcatgctgccagtctcgaccacttttacgtacaccgacattgcctggaacagatccattatcaagtcctgatttaaagtcattgcaggaatgtgcagtttatccagctcaggtggctaacgatactgaagccatcccaacgatgcactggagcccgcaccatgaccgccgcctgcctgatgaccacttaccaacccctggcgctgagctttacccgcggcctgggcacgcggctgtgggaccagcagggccgcgaatacctggacgctgtggcgggtgtggcggtgaccaatgtcggccactcgcaccccaggttagtgacggccatcagtgaacaggccgggctgttgctgcacacctccaacctctacagcatcgactggcaacaacggctggcccagcgcctggcccaactgtctggcctggaccaggccttcttcaacaactcaggggccgaagccaatgaaacagcgctgaaactggcgcggctgcatggctggaaaaagggcattgaagagccgttggtggtggtgatggaaaacgcttttcatggccgtacgctcggcaccatggctgccagtgatgggccttcggtacgcctgggtttccagcggttgccgggggactttctcaaggtgggctttggcgatctggctgcgcttgaagccatcacccagacgtttggcgcgcgtatcgccgcggtgctgctggaaccgatccagggtgaaagcggcgtactgccggcaccgccgggctacctgaaagccctgcgtgatcactgcacccgccatggctggttgatgatgctcgatgaaatccagaccggcattggccgcaccggcgcctggtttgctttccagcatgaaggcatcgtcccggatgtgatgaccctggccaagggcctcggcaacggcgtacccatcggcgcctgcctggcgcgggctggtgtggccgagctgttcacgccgggcagtcacggcagcaccttcggcggcaacccgttggcctgtcgggtcggctgcaccgtgctggacatcatcgaagaacaaggcttgctgcagaacgcggcgcaacagggcgagcgcctgctggcgcggttgcgggtggaattggctgagcacccgcacgtcctggcgattcgtgggcaggggttgatgatcgggatcgagctcgcgagcccttatcgtgacctggcccagcgcgcggcccaggaacacggcctgttgatcaacgtgacgcggggcaaggtcattcggctgctgccgccgctgaccctggatgccaaggaggttgagatgatcgtgcgggccattacccggttactggatcaggcccattgagccattcctggttcagggtttcggtatcgcccaggtactccaacaaccaggccatggccggggacagcttgtcctgtgcccaggccacacacgacgggctggccggaaacggccggctcaattgcagcgccaccaactccccgcgttcgatccatggcaacacctgatgcgccggggccatgccgacacacaggccatcacgcaggcaatcgagggccgaggaccaattcggcactaccagccgtcgctggttatccagggtccaggtgtcgcgcttgggcaggttgcgtgatgtgtcggtcatgcacaacgaggcgaagggccgcagttgatcgtcactcagcaagccttcgacgctggccaacgggtggcgcgcgctgaccacacacagccagttcaacaagcccatgtcgcgaaaggtaaagcggctggccaccggcaccgcgctggtggcgccgatcacaatgtcggtgcgctcatccgccagggcatcccacacgccgttgtacacctcgtactccagcaacagctcgacttcaggaaattgccgatagaaatcaatgaccaactgccggcagcgctggggtttgacgatggaatccaccgccaccttcaactggccactccagccgttggccacttgctggcaaaggcgtcgggtgccgagcatttttttcatcacgccacgggcttcctcgataaacagccggcccgctggcgtgagctcgacgtcccggtggcgccgcacaaacaacggcaccgccagccattcctcgatctgacgcaccgtatagctgatggccgacggcacccggtgcagttcctgggcagcggcgctgaagctgccatgacgcgctactgcgtcgacaacgtccagcgaatattcagaccacatggcggctgccttcaaatttattgataagagtgcccaattattatcgcttcacaccaaaactgtcagcttcataatgggcggcagtcagcaaatagtttgatggcaaggtcaacaaggcttcaatgaaaaattcttttggtttcactgcgtatctggcggggctgagcatgctcggttacctcgccatggacatgtatctgccggcgttcggcgccatgggcgagcaattgcagattggcgcaggcgcggtgggcgccagcttgagtatcttcctcgccggctttgcggtcgggcagttgttgtgggggccgttgtccgaccgcctggggcgcaagccgatcctgctcgccgggctgagcctgtttgtgctcggttgtgcgggcatgttctgggtcgaaacggcgccgcaactgctggcattgcgttttatccaggccattggcgtgtgcgctgccgccgtcagctggcaggcgctggtgatcgaccgctacccggccgacaaggctcaccgcgtgttcgccagcatcatgccgctgatgtcgttgtcaccggctttagcgccgctgttgggcgcgctggtgctgaatcacttcggctggcaggcgatctttggcgtattgctgggggtgtcgttgttgctgctgttgccgacgttgttcctgcgtactgcgcaaaaacgtcaggcagcgaagggtgaaccttcgcgcctgggttatgggcagttactgacgtctcgcgtgttcaccggcaatgtcatgatttttgccgcgtgctcggccagtttctttgcctggctgacggcgtcgcccttcatcctgggcggcatgggctacagcccgaatgacatcggcctgagctacgtgctgcccaccttggcgttcctggtcggcggttacagctgccgcagcgccttgcagcacttccagggcaaggcgctgttgccgtggctgctgctggcgtattgcatcagcatggtggcgttgtacttggtcgccactttgactgcgccgaccctcaccaccttgctgattccgttctgcctgatggcgctgtgcaacggtgccagttaccccatcgtcgtggcgaatgcgctgatgccgtttgcggaaaactccggcaaggcggcggcgctgcaaaatacgctgcaattgggcctgtgctttctcagcagcttgttggtgtcatcgatgatcgaccaaccgctgctgattaccgtgatcgtgatgctggcgaccgcgccgttggcggtattgggttactggctggcacggcccaaggccgatgattcggaactggcagccgcctagaacgtcacttccaggttcaccgtcggcgttgatgtgcggctgccccggccgccatccacgccgaatttgttatgccaatactcgtaacccacccccaggtacaggttcggcttcacgcttttgcccggtcgcaccgccaccatcagcgcggtgcgcatcagggcttccggcgcggtgtcgcgaccgtgatagtcctcgcctttttccccgacataattgataaaaccctggaatttcgccgcatggttggcgatctcgaacgggcgcatccatgtcagattgagcatgtaggtatcgtcgaaggtgtggttcgactcctgcgcgccggggatgccggtgtggttcctttccttgtagtacagcaggctcaggtccagcacgccgacggtgttgaacttcaaggtcgggccgatcaccagggcgcgcttcttggctgaggcgaagttgttgttgcggttggcatcgaaacccaacgtcagcgcgtaatccttgaccaggccgctgcccagcggcacatcgaacacccgcgacgcatacaactggtggcggtatacgacatacacctcactcccgccatgatccgtacccttgcgcgggtcgcggctgtcggacaggaacacatcgaggttgaggaagttgctgccataccggtagccgctggcgtgggtgaagctgtagatgcgcttgctgaattcgtcgggattgttcgggttggtgaactgctgaccgtagcgaaaccctacgctgttgttcatccattccaccgcgacggcctccccgccgccgaggagggtgagtgcgacggttgcgccctgtagtgcctttttcattgttatgggtcctttggcgttctggctcatcacggccggattgtttttgtaacgccgatggagggtaacttgttcgattgattgtatacaactctatggacatccagtccgaacattgcatacagtgaccgcacaacaaaaacagagaacccctcaccatgactatcccgaaggcgtcaccgcagcggccagaagatgagaatctcggcgtcgccgccaacatggcttacggcctgcaacatgtgctcaccatgtacggcggcatcgtcgcggtaccgttgatcgtcggccaggcggcaggtttgtcgccggcggatatcggcctgctgatcgccgcgtcgctgtttgccggtggcctggccacgctgttgcagaccctgggcctgccgtttttcggctgccagttgccgctggtgcagggcgtatcgttcgccggtgtggcgaccatggtggcgattgtcggcagtgatggcgccggcggtgtgccggcgattctcggcgcggtgatggccgcgtcgtttattggtttattgataaccccggtgttctcgcggatcaccaagtttttcccgccgctggtgacgggtattgtgatcaccaccatcggcctgaccctgatgcccgttgcggcgcgctgggccatgggcggcaatagccgcgctgcagatttcggcagcatgtccaatatcggcctggcagcgttgaccctggtactggtgttgctgctgagcaagatcggcagcgcgaccatctcacgcttgtcgatcctgctggcgatggtgatcggcaccgtgattgcggtgttcctcggcatggccgacttctccggggtgacccaggggccgatgttcggtttccccacacccttccatttcggcatgcccacctttcacgtggccgcgatcatttccatgtgcatcgtggtgatggtgaccctggtcgagacctcggcggatatcctggcggtgggtgaaatcatcgacaccaaggtcgattccaaacgcctgggcaacggcctgcgcgccgatatgctgtcgagcatggttgcgccgatcttcggttcgttcacccagagcgccttcgcccagaacgtcgggctggtggcggtgaccggggtcaagagccgcttcgtggtggccacgggcgggctgttcctggtgatcctcggcttgttgcccttcatgggccgggtcatcgcggcggtgcccacttcagtgctgggcggggccggtattgtgctgttcggtaccgtggcggccagtggtatccgcaccttgtccaaggtcgattaccgcaacaacatgaacctgatcatcgtggccacttccatcggctttggcatgatcccgattgcggcaccgagcttctacgatcacttcccgagctggttcgcgactattttccactcggggatcagctcatcggcaatcatggcgatcctgctgaacctggcgttcaaccatttcaccgccggtaactcggaccagcagtcggtatttgtggcggggaccgagcgtagcttgtgctttcgcgatgtgtcggaactgcgtgatggggattacttcaagggcggcaagttgtttgatgcgcagggcagggaaatcccgttggtggcggaagtgtcgaagaaggccgcaaagcctcaaaccactgaggtctgaatgtgggagggggcttgcccccgatagcggtgtgtcagcaaccaatcacttagctgatccaccgtcatcgggggcaagccccctcccacaattggaatgcatccagcttgagcattcagccggccttgagcactttgtattttgctgaacacacctcatccagaaacttcaccacagtccccatgcacgcctggcgttcttccacatggggcatatgactggagtcttcaaacagcgcccagcgcacatcggcgatttcatccaggaacggcttgaccaccagcggcgtggcctcgtcgtgccggcctgagatcaccagggtcggtacattgatcgccgacaggcggccagtggatttccagtctttcaagctgccgatcacatggaattcggtcgggccgctcatggcgtggtacaccgtcggatcggcatcgaccgcggcgaaggtgcgtgccacttcctcgggccacgggatgacccggcacacgtgatggtcatagaacacccgcgatgcggcgaggtattccgggtcctggtagttgccggcggtttcgtgcttgagcagggtttcatgcacgccttcaggcaataatttgcgcaggcggttggcttcgctgacccaggtgcgcatgcacgtcggcgagttggccgggatgaacgcacgcaggcccttgggttgcaggatcgcgtgttcactgccgagcatgccgccccaggactgaccgaggatcgcgtagttatcgctgatctgcaggtggtccagcaggttgttcagctcttcgagaaacaggcctacggtccagaaggatggacctttgtcgggcagatgagtggagcggccgttgcccagttggtcgtagtggatcacggcgtggccgctggcggcgacatccttgaacgcgtcaacataatcgtgggtacatccggggccgccgtggataaccaccaggggcgtgcgaccgctggagaggtcaccggtgacgcggtaccaggtttggtaggcgccaaacgccgcatacccttcgcggattttttcgatgaattccatttcgtgccctgctctgaaaaaaggatcggggacacgataatgggtgaaagaaatttaagtaactagcaaaacagctaggttttgcccggcggtcaatcgtcgagcaggcggtaatgggtggcgcgcaccaccgcttgcacgcggttcttggcccccagcttgtgcatcgccgaggccaggtgcagggtgaccaccgccagggaacggctcagttgtgtggcaatttcggccgcagtcatgccgtcggcggcccatttgaggcactcgcgttcgcgtttggtcaggtgaatgtgcgggtaagtgcgtagctctttgctgaacagcgggtaggccgcttcctgcaaggcatgggaaatcaggccgaagtccgacagggtctgctgcgcatcctgcagcacgttgcgagcactgccggtacgcagcccggtcagcgaggcaaaaccaccacggggcaggtggatcggcacgctgacgccgcaggtcaattgctggtcatgcaggtaggatgaaaccggcgcatggcagggatcgatgatcttttgcagcggggtgtcggccttgacgtcgtaggaccagacgaacggcgacacccggctcagggccagatgttgtaccgggtcaatctggtagaacccttcgctgcaccacaaggcatgccagtcgggcggggtgttgcgcagttgcagcaccgaaggggtgatcaatgcaccatcctggtcgatcggcaccggggtgtagtcgtacaccaaggcgtcgaagcccagttgctgggcgaggataaaggtgttgtccatctgctcgtccaggctcctgcccggcatcagacggtgatttaaggcagtcagcttggccagcatccgttctgctcccgaattcgtttgaatctcgacttgctgcaagtagaatgccacgccccggcgaaggactgccaggccaaacctataagaaatgctaggttatggacgcgcggcatcctcggtagtgttggcctgataaacggcccgctacctgccaggccgacactacacaaggaaagtatgcatgtggcgtgaaattgcccccgaccagcagtacaacgtgcaagtcgatggccataacctcgtggtctacagcttcggcgaaggcgatgaggtgctgctatgcctcaacggcgggccgggcctgccgtgtgactacttgcgcgacgcccatggctggctcaaggaccataacctgcgagtggttgcattcgaccagcttggcacgggcgcatcagccagacccactgatatttccctgtgggaaatccgccgttatgtcgaagaagtcgaaactgtgcgccaggccctgggcctgggccgtgtgcatttgctcgggcattcctggggcggctggctcggtatcgaatacgccatccattaccccgacgcactgaaaagcctgatcctcgaaaacaccgtcggcgacattccgcacctgtcccaggagctggagcgcctgcgcggcgccctcggcagcgaaaccgtggccatgatgcaacgccacgaggccatgggcaccctcgaccacccgcaataccaggcggcgatcaccttgctcaactaccgccacgtgtgccgcctcgatgaatggcccgagccggtcaagcgttcccttggcgactggaacatgggcccctacgaaaccatgcaggggcccaacgaattcctctacatcggtaacctcaaggactggaaccgcatccccgagatggccgaattcaagatgccgatcctgatcaccaccggccagcacgacgaactcaccccggcctgcgccatgcgcatgaaaatggcggcccgacacgccgaattgcatgtgttccccaacagcagccatatgcctttttacgaggagccccaggcgtatttcccggtgttgctggacttccttgctcgtcaccgaggctgacggatgaacctggcgcgttatcgttttgtgctgtcccggccgctgcagttgctgccggtgctgtttggcatcagcctgatcacctttgtgctggtgcgctcgatccctggcgacccggcgcgcgccttgctgggctcgcgcagcacaccggatgccttgctgaagatccgcgcccagtacggcctcgaccagccgttgtggctgcaatatttctacttcctcaagaacttgctgaagggcgacctcggccaatcgctgctgtacaaggtcgacgctctcaagctgattgtcacgcgcatcgagcccaccctggtgctggtactgggcagcgtggtgctggcgctgctgattgcggtgccgctggcgacgtgggccgcacgcaacaagggcggctgggcggacaacctgatccgcgtgttcaccacggttggcctgggcatgccggcgttctggctcggcttgatgctgatcctgttgctgagtgtgcagtggggcttgtttccggtgtccggctacggccgcacctggctggacaaggcgcatcacatggtgctgccgtgcctgacgattgccctggcgctgtcggcggtgctggtgcgcaacctgcgggcgagcatgctgatggagttgcaggccgatcacgtgaccgcggcccgcgcccgtgggctgtcggaaaccgccgtttttcgtcggcatgtgttgccaaattccctggtgccggcggtcaacctgctggcggtgaacatcggctggctgatcagtggcacggtggtgatcgaaagcctgttcgccatccccggcatcggccaattgctggtgcgcgggatcttcacccgcgattacatggtggtgcagggcgtggccatggtgctggcctgcgcgacggtggtggtcaacttcatcgcggacgtggtgacggtggccctcgacccacgggtgaagatgcaatgagcagccgcccgttgattgccccgtggcgcatgcgcctgcgcttcggctttcgcaatggccggctgacggcggcgtggggcctgttgattctgctggtatggctggcgcttgcgctatttgcgccgtggattgcgccgtatgacccgatcgcgcagaacactgatttcagtttgctcggtccgagtcttgcgcatccgtttggtacggataactacggtagggacatcctttcgagagtgatctggggcgcgcgcatcgacctgcaactggcgattgtcggggtgatcttccccttcatgatcggcaccttcatcggtgcggtctcgggctatatcggcgggcgtttcgacagtttttgcatgcgcgtgatcgacgtgatcctggcgtttccgttcctggtgctgatgctggcgatcatggcgattcttgggccgggcttgaagagtttctatatcgccatggcgctggtcggctgggtgtcgtatgcgcggctgatccgctcgcagatcctggtgctcaaggaaagcgagtttgccctggccgccaagagcctgggctttggccatgggcgcattctgttccggcatctgctgcccaatgcgatgttcggctcgattgtgttttccatgtcggacgcggtgctggtgctgctcaatggcgctgccgtgagctacctgggcctgggcgtgcaaccgccgaccgccgagtggggcaccatggtggccgaggggcaggcctttatcaccacggcctggtggatctgcacctttccggggctggccatcgtgaccctggccatgggcttcagcctgctggccgatggcgtagcgcaagtgttgggggatcgctcatgagcctgctgcaagtgcgcgacctcagtgtcatcgccaacaatgccgggcgcgatgtaaccctggtcgatcgggtgtcgttcgacttggctgaaggcgaaatcctcggcctggtaggggagagcggttcgggcaagaccatggcctgtcgcggcctgatgcgcctgctgccatcgcccagcctgcgcgtgcaaggcggcgcggtgcggctggccggtcaggatttgttggccttggatgacgctggaatgcgcgccgtgcgcggcggccaactgggcatgatcttccagaatcccagcagccacctcgacccgctgatgcgtatcggcgagcagattgccgaaggcattcgactgcatcaaggcgcgtcaaaaaaagacgcacgattgctggctatcgacgtgctgcgccaggttggcatccccgatccccaggcacgggtcgacaactacccccacgagttttccggcggcatgcgtcagcgcgcaatgatcgccgtggccctgggctgcaaccccaaagtattgatcgccgacgagccgaccacggccctggatgtgacagtgcaggcgcagatcctgcggttgctgctggacctgcgtgaccagcgcggcctgtcgatcatcatgattacccacgacctcggcgtggtcgcgcaaacctgtgattccatcgccgtgatgtacgccgggcgcctgtgcgagcacggcagcaagtacgacttgctggctcgaccccggcacccttacaccgccgggctgatcgattgccagcccgcccacagcagcggccacgccttgctgcgcacgatccccgggcagccgccgctgctggacgcattgcccgccggttgccgcttcaacccgcgctgcccgcaggtcggggcgttgtgcaccgaggtgttgccgcaaggtgctcgggtcgcctgtcattacccgttgggagcgcagccatgagcctgttgcagatcaaggaccttgaggtgaagtttgccgcgtccggcaccggcctgttcggcttgaacaagcagtgggtgagggcggtgaacggcgtgtcgctgaacctggccgccggtgaaaccctggggttggtgggcgagtccggcagtggcaaaagcacactgggccgcgccatcctgcacctcaacccgatcagcgccggccaggtgttgtttgatggcatcgacatggcccatggcagcgccatcgacatcactcgtctacggcatgaaaccgcaatgatcttccaggacccgtacgccgcgctgaacccgcgccacaccatcggtgaaaccatcgccgaggtgctgcgcgtgcagcgcaaagtcgcgccagagcagattcgcgcgcgcgtgaatgaactgctcgacctggtcggcctgcgccccgaactggccagccgcaagccgggctccctcagcggtggccagtgccagcgcgtcggcattgcccgggcgctggcggtggagccacgcctgatcatcgccgatgagtgcgtggcggcgctggatgtgtcgatccagggccagatcatcaacctgctactggaactgcaacagcgcatgaacctggcgatcctgtttatcgcccatgacctggccatcgtgcgccgcctgtgcgaccgcgtggcggtgatgtacctgggcaagatcgtcgaggagggaccggtggaagcggtctttacttcaccgcgtcacccctacacggcggcgttgatccaggcgattcccgagatcgatccgcatcggccgttacctacgcaacctttgccgggtgaaccaccgagcccactgaatttgcccacaggctgcgccttccacccacgttgtcggcatgcccgcgccatgtgttccgtggtgttgccgccaacgcatttcctgcacgagcatcggtacagttgcgtgcttgaagaacctttgctttgacccatccctgccattcatgaacaaggagttatgacatgcaatcgcgccacttgaagttgctcgccgccgccacactgaccgcctggtcgctgactgccggtttcgcgcaggccgccggtgtactgaccatcggctgccgtgaagacagcaccacgtttgacccgatcaaaagcgcgcaaaaccgcgacacctgggtcttcgccaacgtctacgacaccctggttcgcgtcgacaacctgggcaccaagatggagccgggcctggccgaaagctgggatatctccaaggacggcctgacttacaccttcaaactgcgtgacgcaaagttctccgatggctcggccattaccgccgacgatgcggcgttcagcctgctgcgtatccgcgacaacaaggcttcgctgtgggcggatccgttcaacctgatcagcacggccaaggcatcggacccgaaaaccctggtggtcaccttgaagaccccggctgtggccttcctctcgcaactggcgtcgccgacggtgtcgatcctgtcggaaaaagccatgaccaagatgggcgaagacgcctactcggaaaacccggtgacctccggcgcgtttaccgtggatgagtggcgcaagggcgaccgcgtgatcctgaagaagaacccgaacttctggcaggccaagaacgtgagcctggatggtgtggagtgggtatcggtcaccgacgacaacacgcgcatgcgcatggtgcagaacaacgagctggacaccgcgatcttcgtacccttctcgcgggttgaagagctgaagaaagaccagaacgtggtgatccacgccgacccgtccacccgtgaagatcacttgctgatcaatcatgcccacgggctgctggccaagccggaagtgcgtcaggcgttggacatggccatcgacaaacaatcgctggtgaagaccgccacttacggtcaaggcactgtggcttattcctacattccaaagggctcgctgtaccactacgccaacaacctgcagcgcccgtatgacccgaccgctgccaagaagctgttggagcaggccggtgccaaggacttgaagctcaactacgtggtcaatgccggcaacgaggccgacgagcagattgcggtgatcatcaaagaccagttggccaaggtcggtgtgactgccaacctgcaaaaggtcgacccgacccagagctggcagatgctggtggacggtgagtacgatatttcggtgatgtactggaccaacgacatcctcgacccggaccagaagaccaccttcgtgcttggccacgacaccaaccagaactacatgacccgctacaagaacgacaaggtcaaggacctggtggctcaggcgcggatcgaggctgacccggtcaagcgtgagcagatgtatgtggagttgcagaaactggcgaaacaggatgtgaactggatcgacttgtactacagcccgtacatcaacatctcacgcaagaatgtgagcaacttcctgcagaacccgttgggccgcttcaccctcgaagaagtggtgaaaaactaaaccacactgctgaaaaatgtgggagggggcttgcccccgatagcggtgggacagtcactgtatctgttgactgatccactgcaatcggggggcaagcccctcccacatttggttttacaatgtgccggttattgcgcgtcgaacgcctggccgttgatgccggtactgtccggccccatcaggtacaggtacaccggcatgatctcttccggagcaggccgctccatcgggttttccccgggatacgcctgggcgcgcatgctggtgcgcgtgccgcctgggttgatgctgttggagcgtactgctgccacatcctcaagctcatcagccaaggtttgcatcaagccttcggtcgcaaacttcgacacgccataagcgccccagtaagcccgacccttgcgcccgacgctgctggaggtgaacaccaccgacgcatcctgggacaatttgagcagcggcaacaaggtgctggtcagcatgaacatcgcgttgacgttcacgtgcatcacccgcatgaagttctcgccggacaactgttcgagcggcgtgcgcgggccgatgatcgaggcgttgtggagcaggccgtcgaggtggccgaattccttttcgatcatcgcggccagctcatcgtattgatggggcagggcggtctccaggttgaaggggatcaccaccggttgcggctggcctgcggcttcgatttcgtcatacacctgggccaggttggcttcggtcttgcccagcagcagtacggtagcgccgtgggcggcataggttttcgccgccgcggcgccgatcccgcgaccggcgccggtgaccaggatcacccggcctttgagcagttctggacgtgcggagtaatcaaacataaatagcctcgacagaattcagcagcttatgaaccccaactccgaaaacactgaagatccccagtgggagggggcttgcccccgatgagggcctatcagtccgataggtgcgggctggcacaccgctatcgggggcaagccccctcccacattggatcttcatagagggtgggggcgttgagtaatcagcaactgcacagtgcgttatcgagcaccttgcgcagttccagcgggtgatccaccaccacatcggcgccccaatggcgtgggttgtcgtccgggtggatgtagccgtaagtgaccgccgcggtgcgggtgccggcgtcgcggccggactcgatgtcgcgcaggtcgtcgcccacgaacagcacgctggccgggtccaggccgagcatcttgcaggccaggatcatcggctccgggtccggcttgctgtttttcacgtggtccgggcagatcagcagtgccgagcgttcggccaggccgagttgctgcatgatcggttcggcaaaacgcaggggcttgttggtgaccacgccccagaccagcttggacttctcgatgtcatccagcagctcggccatgccgtcgaacaacttgctgtgcaccgcgcagcccttgaggtagcgctcgaggaattcctggcgcagttcttcaaagcctggcgattccgggtccatcgagaaggtcaccgccaccattgcccgcgcaccgccggagatttcatcgcggatgtgctgcgggttgatcggcggcaggtcgcggtcggcgcgcatggcctggcagatggcgataaagtccggcgcggtatccagcagggtaccgtccatgtcgaagagaaccgctcgcaacttcacaggctcactcctcgcgcagggtctggatcatgtagttgacgtccacatcgttggccagcttgtagtgcttggtcagcgggttgtaggtcaggccgatgatgtccttgacggtcagcccggcctggcggctccacgcacccagctcggagggacggatgaatttcttgaagtcatgggtgccgcgcggcagcagcttcatgatgtattcggcgccgatgatcgcgaacaggtaggccttggggttgcggttgatggtggagaagaacacctggccgccgggcttgaccatgcggaagcaggcgcggatcaccgaggacgggtccggtacgtgctccagcatttccaggcaggtgaccacgtcgaactgctcgggcatctcttcggccagggcttcggcggtgatctggcggtattccacgctcaccccggactccaactggtgcaactgggccacggccaagggcgcttcgcccatgtcgatacccatcacggtcgcgccgcgttgggccatggcttcgctgaggatgccgccgccgcaaccgacgtccagtaccttcttgccggccaggttgacgcgctcgtcaatccagttgacccgcagcgggttgatgtcgtgcaaaggcttgaactcgctttcgcggtcccaccagcggtgagccagggcttcgaatttggcgatttcggcgtggtcgacgttgctcatggtgaatcctctaaatctgataaatcggtttgtcagtcttgaacgccggggttcaagaccttcgttattcgctgtgcccgctgatgcgttggccccaggcgatggccgtggtggtcaactggtgttcatccatgcgggtcaattgccggtcgtcgagcaattgcttgccggcgacccaaaggtgtttcacgcaatcgcgtccggtggcatatataagctgtgagaccggatcatagatcggttgttgcgccagccccgacagatcgaaagcaacgatatccgccgccttgccgacttccagcgagccgatctcactttccaggcccatggcccgcgcgccattgagggtggccatgcgcagggcgcgatgggcatcgagtgcggtggccgaaccggcgacggccttggccagcatcgccgccgtgcgggtttcgcccaacaggtcgaggtcattgttgctggcggcgccatcggtgccgatggccacattcacgccagcctgccacagacgctccaccgggcaaaagccgctggccagtttcaggttggattccgggcaatggatgacgctggtgttgctttctaccagcaaagccaggtcgtcctcgctgatttgggtcatatgaacggcctggaagcgcgggcccagcagccccaggcgacccaggcgtgccagcgggcgctcgccggtctgctcgaccgcttgctgcacttcgaaggcggtttcgtgaacatgcatatggatcgcggcgtccagttcttcggcgatcacccggattttttccaggttgtcatcgcacaccgtgtagggcgcgtgtgggccgaaggtgatcttgatgcgcgggtggtgcttgaggtcgccgaacagctcgacaccttggcgaatcgcctcgtcggcgctgccggcgccggggatcgggaagtcgaggatcggaatcgcgatctgcgcgcgcatgccgctgttgtgcacgcaatcgctggcgaccttggggtagaagtacatgtcggagaagcaggtgatgccgcccttgagctgttcggcgatggccaggtcggtgccgtcgcgtacgaaggcttcatcgacccacttggcttcggcgggccagatgtgtttttccagccaggtcatcagcggcaggtcatcggccaggccgcgaaacaggctcatcgcggcgtgcccgtgggcgttgaccaggccggggctgagcagcatgcccggcagttcgcgggtctccttggcggtcagtttcaacgccgcctggcgagtcccgataaaggcaatgcgcccatcgcggatgcccaggccatgctccttgagcaccacgccggcgggttcgacaggcaccagccacgtaggcagcaacaataggtcgagcggggcggcagtggcggtcatcgcaggcttcttcccaggcagctataaaagaagggcgaagtatacccgagcgtcctggctggcggatcgctataatcggcggctttgtttatgagtgcggagtaagggatgcgcgatcgactgttggctgcggagaaagtgaaggccatcgattggcgtgatggcgcactgtacctgctcgatcagcgtgccttgccgtcccgggaaagctgggtggcctgcgtgacggtcgatgaagtggctgcagccattcgctcgatggtagtgcgcggtgcgccggccatcggcatcagcgccgcatatggcctggtgctggccgcccgtgagcggatcgccgaaggcggtgactggcaggctgcgtgggaagaagactatgcattgttggccgatgcccgacccaccgcgtcgaacctgttctgggcgttgaagcgcatgcgtgatcgcctggatcgtgtgaaaaagcacgccgacccgctggcggtgctggaggcggaagccattgctatccatgaaagtgaccgcgaggccaacctgaccatggcccagctcggcgtcgagctgatccgcaagcaccagggcaacgcccaggccatcctcacccacggcaacgcgggagccctggcgaccggcggtgtcggtacggcactcggggtgattcgcgcggcttacctcgaaggcatggtcgagcaggtctacgccaatgaaacccggccctggctgcaaggttcgcggctgaccgcctgggagctggcgggcgagggcatcccggtgacggtgaatgccgactcggccggtgcgcatatcctcaagaccaaaggcgtgacctgggtgatcgtcggcgccgactgcattgccgccaacggtgatgtgatcagcaagatcggcacctaccagttggcggtgtgtgcgatgcaccacggtgtgcgtttcatggtggtggcgccgagttctaccctggacctgatgatggccactggcgatgacgttgccctggaagaacgtgatgccggtgagttgctggaagtcgccggccagcgcttcgcagcggatgtggcggccttcaatccggtgttcgacgtgaccccggctgacctgatcgatgtgatcgtgaccgaaaaaggcgtggtcgaacgaccggacaccgccaagttggccaaattgatgtgccgtaaacgcttgcattaagccaatttgccgccgaaatcgggcttggatccagctcagagcccctctcgtcgccctcaagcctgtcatccgtcaacttactatgctccatgcgcatcagggggataggtgcgtggcggcgattgtgataacatccggcggtttccagggctgccccgaggggcggcctataacgtgcagatccgtgtcataactcgttgatttgtcgtaagtcgttgtcaggcactctgccggcagcggcgagcttcgttcgtcccatatggatgtgacgaggtttcacccgaaaaaggaatcaggcttctcatgggcgaactggccaaagaaatcctcccggtcaatatcgaagacgagctgaaacagtcctacctcgactacgcgatgagcgtaattgtcggtcgggcactgcctgatgcgcgcgatggcttgaagcccgtgcaccggcgtgtgctgttcgcgatgagcgagctgggtaacgactggaacaagccgtacaagaaatctgcccgtgttgtcggtgacgtgatcggtaagtatcaccctcacggcgacactgcggtgtacgacaccatcgttcggatggcccagccgttttccctgcgctacctgctggtagacggccagggcaacttcggttcggtcgacggcgacaacgccgcggccatgcgatacaccgaagtgcgcatgaccaagctggcgcatgagctgctggccgacctgcataaagaaaccgtggactgggtgccgaactacgacggcaccgaaatgatcccggccgtcatgccgaccaagatccccaacctgctggtcaacggttccagcggtatcgccgtgggcatggcgaccaacatcccgccgcacaacctcggtgaagtcatcgacggttgcctggccctcatcgacaaccccgagctgaccgtcgatgagctgatgcaatacatccccggcccggactttccgaccgctgcgatcatcaacggtcgcgccggcatcatcgaagcctaccgtaccggtcgcggccgcatttacatgcgcgcccgctcgatcatcgaagacatcgacaaggtcggtggccgccagcagatcgtcatcaccgagctgccttaccagctgaacaaggcgcgcctgatcgagaagatcgccgagctggtcaaagagaagaagctcgaaggcatcaccgagctgcgcgacgagtccgacaaagacggtatgcgcgtggtgatcgagctgcgtcgtggcgaagtgcctgaggtgatcctcaacaacctctacgcccagacccagctgcaaagcgtgtttggtatcaacgtggttgcactgatcgatggccgcccgcgcatcctgaacctcaaggacctgctggaagccttcgtgcgtcaccgccgcgaagtggtcacccgccgtaccgtgttcgaactgcgcaaggcccgcgaacgcggccacatcctggaaggccaggcagttgcgctgtcgaacatcgacccggtgatcgccctgatcaaggcctcgccaaccccgtcggaagccaaagaggcgctgatcagcaccccttgggaatccagcgccgtggtggccatggttgaacgtgccggcgccgactcgtgccgtccggagaccctggacccgcaatacggtctgcgcgaaggcaagtacttcctgtcgccggaacaggcccaggccatcctggaactgcgcctgcaccgcctgaccggcctggagcacgagaagctgctggccgagtaccaggagatcctcaaccagatcggcgagttgatccgcatcctcagcagcgccgtgcgcctgatggaagtgatccgcgaagaactggaagtgatccgcgccgaatacggcgatgtgcgccgcaccgagattctcgatgcacgcctcgacctgaccctgggtgacatgatcccggaagaagagcgtgtagtgaccatctcccacggtggctacgccaagacccagccgctggctgcgtaccaggcccagcgtcgtggcggtaaaggcaagtcggctaccggcgtgaaggatgaggactacatcgcccacctgctggtcgccaacagccacaccacgctgctgctgttctccagcaagggcaaggtgtactggctcaagacctacgaaatcccggaagcgtcccgtgctgcccgtggtcgcccactggtcaacctgctgccgctggacagtgatgaatacatcaccaccatgctgccggtcgaggaatacaccgaaggtcacttcatcttcatggccaccgccaaaggcaccgtgaagaagaccccgctggaatccttcagccgccagcgcagcgtgggcctgatcgctctggagctggacgaaggcgacgtactgatctccgctgccatcaccgacggcgagcgtgaagtcatgctgttctccgacggcggtaaagtaacgcgcttcaaggaatccgacgtgcgcgccatgggccgtaccgcccgcggtgtgcgcggcatgcgcctgccagaagggcagaagctgatttcgatgctgatcccggaagaaggcagccagatcctcaccgcctccgagcgtggttatggcaagcgcaccgccatcagcgagttcccggagtacaagcgtggcggccagggcgtgatcgccatggtcagcaacgaccgcaacggccgtctggtcggcgcggtgcaggtgctcgacggcgaggaaatcatgctgatctccgaccagggcaccctggtacgtacccgtgtggctgaagtgtcgagcctgggccgtaacacccagggcgtgaccctgatcaagctggccaaggacgaaaaactggttggcctggagcgtgtccaggagccatcggaagtcgaaggcgaagagctggaaggtgaggagtttgagggcgaggtgatcgcagcaggcgataacaacgtcgacgagccaaccctcgacgctgccgcagacgaagaagaaccgcaggaataagcggacacacagggggcggatgaagattcgcccccttgttgtttgtcccttatgaaataacacgtcctttggctggacgcggtcaatgtgggagctggcttgcctgcgatggcagcgccgcggtatcactgcgctaccgaggtgcccctatcgcaggcaagccagctcccacaagggttcgctccagagaaaggttgttaccgaacatgattgcagccccaccagatcagagtgagattggatgtgagcaagagagcctataacttctgtgccggtcccgcggcgcttcctgaagcagtcctgcagcgtgcgcagggtgaactcctcgactggcatggaaaaggcctctctgtgatggaaatgagccatcgcagcgatgagttcgtgtctatcgccaccaaggccgagcaggacctgcgcgacttgctggacatcccatccaactacaaggtgctgttcctgcaaggtggcgccagccagcagttcgcccagatcccgctgaacctgctgccggaagacggcactgccgactatatcgacaccggtatctgggggcagaaggctattgaagaggcctcgcgttacggtcacgtcaatgtggcaggcaccgccaagccttacgactacttcgccattccgggtcagaacgagtggaagctgtcgagggacgctgcctacgtgcactacgtggccaacgaaaccattggcggcctggaattcgactgggtaccggaagtgggcgacgtgccgctggtgtgcgacatgtcctcggacatcctgtcgcgcccgatcgacgtgtccaagtacggcatgatctacgccggcgcccagaagaacatcggtccgagcggcatcctggtcaacatcatccgcgaagacctgctgggtcgtgcgcgatcgctgtgcccgaccatgctcaactacaaggtcgcggccgataacggctcgatgtacaacaccccgccggcgttcgcctggtacctgtccggcctggtgttcgagtggctgaaagagcagggcggtgtcgccgccatgggcaagctcaacgaagtgaagaagcgcaccctgtacgacttcatcgacgccagcggtctgtacagcaacccgatcaacctgaccgaccgctcgtggatgaacgtgccgttccgcctggctgacgaccgcctggacaagccattcctggccggtgccgacgaacgcggcctgctgaacctcaagggtcaccgctcggtgggtggcatgcgcgcctccatctacaacgccgtcgacatccacgcgatcaacgcgctggttgcctacatggcagagttcgaaaaggaacacggctaatgtctgagcaagaactcaaggccctgcgcgtacgcatcgacagcctggacgagaaagtcctggagctgatcagtgagcgtgcgcggtgcgcccaggaagtggcacgggtgaagatggcatccctggccgaaggcgaagtgccggtgttctaccgtcccgagcgtgaagcccaggtgctcaagcgcgtgatggagcgcaacaagggcccgttgggcaacgaggagatggcgcggttgttccgtgaaatcatgtcttcgtgcctggcgctggagcagccgctgaaagtggcgtacctcggcccggaaggcaccttcacccaggcggcggccatgaagcacttcggccacgccgtgatcagcaagccaatggcggccattgacgaagtgttccgtgaagtggcggccggtgcggtgaactttggcgtggttccggtggaaaactccaccgaaggcgcggtcaaccacacgctggacagcttcctcgaacacgacatggtgatctgcggcgaagtcgagctgcgcatccaccaccacctgctggtgggcgagaacaccaagactgacagcatcagccgcatctactcccacgcgcagtcgctggcccagtgccgcaaatggctggatgcgcattacccgaatgtcgagcgcgtggcggtctccagcaacgccgaagccgccaagcgggtcaagggtgagtggaactcggcggccatcgccggtgatatggcggcgggcctgtacggcctgacgcggctggccgagaaaatcgaggatcgcccggacaactccacgcgcttcctgatgatcggtagccaggaagtaccgccgaccggtgacgacaagacctcgatcatcgtgtccatgagcaacaagcctggcgcgctgcatgagctgctggtgccgttccacgacaacgggattgacctgacgcgcatcgagactcgtccttcgcgcagcggtaaatggacttacgtgttctttatcgacttcatcggccatcaccgcgacccactggtcaagggcgtgctcgagaaaatcagtcaggaagccgtggcactcaaggtgctgggctcttacccgaaagcggttttgtgaggcgttaacatgagtggcaacttcctcgccctggcgcagccgggcgtgcaacaactgtcgccttacgttccgggcaagcctgtggatgagctggcgcgtgagttgaacctggatccttcgaaaatcgtcaagctggcgagcaacgagaatccgcttggtcccagccccaaggtattggcagcgattcgtgaagagctggctgagctgacccggtatccggacggcaacggcttcgcgctcaagtcgctgctggcggaaaagtgccgggtcgagctgaaccaggtgaccctgggcaacggttccaacgacattcttgaactggtcggccgtgcctacctggcaccgggcttgaacgcggtgttcagcgagcacgcgtttgcggtctatccgatcgtgacccaggccgtcggtgccgatgcgcgcatcattccggcgaaagattggggtcacgacctgccagccatgctggcggccatcgacgcccagacccgcgtggtgttcatcgccaacccgaacaacccgaccggcacctggttcgacgcccaggcgctgaacgatttcctgcaagacgtgccggaacacgtgctggtggtgctggacgaggcctatatcgagtatgccgaaggcagcgacctgccggacggcctggatttcctggccgcgtacccgaacctgctggtgtcgcgcaccttctccaaggcctacggcctggcgtcgttgcgcgtgggctacggcttgtccagtgcggtggtcgccgatgtgctgaaccgcgtgcgccagccgttcaacgtcaacagcctggccctggcggcggcctgtgcggcggtgaaggatgcagagtatctggaagagggtcgccgcatcaacgaaagcggcatggtgcagttgcaggaaggcttccgcgaactgggcctgggctggattccgtccaagggcaactttatctgcgtcgatctcggccaggtggctgccccggtgttccaggggctgttgcgcgaaggcgtgatcgtgcgtccggtggccaactacgggatgccgaaccacctgcgcatcaccatcggtctgccggctgaaaacagccgcttcctggaggcgctggccaaggttctggctcgtggttgatgtcactgcattgcaacctgctgtgcctatgatcggtcgcctggtggtggtcggtctggggttgatcggtggctccttcgccaaaggcctgcgtgaaagcgggctgtgtggcgaagtggtcggtgtggacctggacccgcaatcgcgtcagttggcggtcgagttgggcgtggtggatcgctgtgaagcggacctagcgctcgcgtgccagggcgctgacgtgatccaactggccgtacctatcctggccatggagaaattgctcgccgtgttggcgggcatggacctgggccaggcgatcctcacggacgtcggcagtgccaagggcaatgtggtgcgcgcggcgcaacaggcgtttggtggcatgccgacgcgtttcgtgccgggccatccgattgctggttcggagcaaagcggggtggaggcgtcgaatgcgcagctgttccgtcgccacaaagtgatcctgacgccgcttgcgcaaaccgatccggcggcgctggcggtggtggatcgcctgtggcgcgagttgggtgcggacgtcgagcacatgcaggtcgagcgccatgacgaagtgctggccgcgaccagccatctgccgcatttgctcgcatttggcctggtggactcgctggccaagcgcaacgagaacctcgagattttccgttacgccgccggtggcttccgcgacttcacgcggattgccggcagcgacccggtgatgtggcacgacatcttcctcgccaatcgcgaagcggtgttgcgcaccctggacaccttccgcagcgacctcgacgccttgcgcgatgcggtcgacgccggggatggccatcagttattgggcgtgtttacccgtgcgcgggtggcgcgtgagcatttcagcaagatcctggcgcgccgggcctacatggaaaccgctgtgaacgctgatgagctgaccttcctcgccgaacccggtggccgcttgagcgggcgcattcgggtgccgggcgacaagtcgatctcccatcggtcgatcatgttgggttcattggctgaaggcgtgactgaggttgagggtttcctcgaaggcgaggacgcgctggcaactttgcaggcgtttcgcgacatgggcgtggtgattgaagggccgcaccatgggcgcgtgaccatccacggcgtgggtttgcatggcttgaagccggcgccggggccgatctatctcggtaactcgggcacctccatgcgtctgctgtccgggttgctggctgcgcagagcttcgacagcgtgctgacgggcgatgcttccctgtccaagcgcccgatgagtcgcgtggccaagccgctgcgggaaatgggcgcggtgatcgagaccggcccggaggggcgtccgccgctgactatccggggtggtcaggtgctcaaaggtttcgattattcgatgccgatggccagtgcgcaggttaaatcctgcctgttgctggccgggctttacgccgagggcaagacctcggtgaccgagcctgcgccgacccgtgatcataccgagcgcatgttgcgcggttttggttatccggttgatgtggtgggggccaaggcgtcggttgagtctggccatgcgctggttgcgacgcatattgaagtgccgggggatatttcctcgtcggcgtttttcctggtggcggcttcgattgccgaaggctccgagttgttgctggaacatgtgggcgtcaacccgacccgcaccggcgtgatcgacattctgcggctgatgggggcggacattaccctggaaaatccgcgtgaagtgggcggcgaaccggttgctgatctgcgcgtacgtgccgcgacgttgaaaggtattgaaatccccgaggcgctggtgcctttggcgatcgacgagttcccggtgctgttcgtcgcggcggcctgtgccgaagggcggaccgtgttgcgcggcgccgaagagctgcgcgtgaaggagtccgaccgtatccaggtcatggccgatggtctgctggcactgggcgtgaagtgtgaaccgacgcctgatgggattatcattgacggtggcctgatgggcggtggtgaagtgcatgcccatggcgatcaccggattgccatggcattcagcgtggcttccctgcgggcggcggcgccgattcgtatccgtgactgcgccaatgttgctacgtcttttccgaactttcttacactgtgtgcccaagtcggcatccgtgttgcccaagaggctcaattgtgaatatcaaagcaccggtgattaccatcgacgggccaagtggctcgggcaaaggcacgatcgccggcatcctggccaagcgcctgggctggtgcctgctggattccggcgcgctgtaccgcctgctggcattcgccgcacgcaaccatggcgtcgacctgaccaacgaagaatccctgaagctgctggcggcgcaccttgatgtgcagtttgttggcgcgacggaaggtcatccccagcgcataatccttgaaggggatgatgtgaccgatgatctgcgcaatgagcaagtcggctcctgggcctcccaggttgccgcactgccagcggtgcgggacgcattgttgcagcgccagcgggctttccaggagccaccgggcctggtggccgatggccgtgacatgggaaccgtggtgtttcccgaggcgccattgaagattttcctgaccgccagcgccgaggagcgggctcgccgccgctacttgcagttgaagggcaaagtcgatggtgttagtctgtcgagtctgctagatgagatccgtgcacgcgatgagcgtgatacccagcgcgcagtagccccgctcaagccggcggctgatgccatacagctggattccacggagttgtccatcgagcaggtgctggaacgcatcttgagcgagatcgccattcgcgatatcgccgggtgaccaagaaggctgcaggggaccagtcatagtcctgcggtgcttcttttaattgaaactgacccacaccgtctggggtgtggagatgggcgtattcttcgcccttatcaacaggaattaaaatgagcgaaagctttgcggaactctttgaagaaagcctaaaaaccctgaaccttcaggcaggctccatcatcaccggtgttatcgttgatatcgattaccaagctcgctgggtaaccgttcacgctggtctgaagtctgaagctctgatcccgctggaacagttctacaacgatgctggtgatctgacaatcaatgtcggtgacgaagttcacgttgctctggactcggttgaagacggtttcggtgaaaccaagctgtcccgtgaaaaagccaagcgcgctgaatgctggattgttctcgaagcagccttcgcagctgaagaagtggtcaagggcgttatcaacggtaaggttaaaggcggcttcactgtcgacgttaacggcatccgtgcgttcctgccaggttctttggtcgacgttcgtccagtgcgcgacaccacgcacctggaaggcaaagaactcgaattcaaggtcatcaagctcgaccagaagcgcaacaacgttgtcgtttcccgtcgcagcgtcctggaagcagagaactccgccgagcgtgaagctctgctggaatccctgcaggaaggccaacaagtcaaaggtatcgtcaaaaacctcaccgactacggcgcattcgtcgacctgggtggcgtggatggcctgctgcacattaccgacatggcttggaagcgtatcaagcatccttccgaaatcgtcaacgttggcgacgagatcgatgtcaaggttctgaaatacgatcgcgagcgcaaccgtgtttccctgggcctgaagcaactgggtgaagatccatgggttgctatcaaagcccgttacccagaaagcactcgcgttaccgcgcgtgttaccaacctgaccgactacggctgcttcgctgagctggaagaaggcgtggaaggcctggtacacgtttccgaaatggactggaccaacaagaacatccacccttcgaaagtcgtacaagtcggcgacgaagtggaagttatggttctggacatcgacgaagagcgtcgtcgtatctccctgggcatcaagcagtgcaaatctaacccatgggaagatttctctggccagttcaacaagggcgataaaatctccggcaccatcaagtcgatcaccgatttcggtatcttcattggtctggacggcggcatcgacggcctggttcacctgtccgacatctcctggaacgaagtgggcgaagaagctgttcgtcgtttcaagaagggcgacgagctggacaccgttatcctgtcggttgacccagagcgcgagcgtatctccctgggtatcaagcaactggaaagcgacccgttctctgaatacgttcaggacaacgacaaaggcgcaatcgttaaaggcatcgtgaaggaagttgacgctaaaggcgccatcatcactctggccgacgatatcgaagcgactctgaaagcctccgaaatcagccgtgaccgcgttgaagacgcgcgtaacgttctgaaagaaggccaggaagtagaagccaagatcatcagcgttgaccgcaagagccgtgtaatccagctctccatcaagtcgaaagacgatgctgaagagaaagaagccatccagagcttgaaagacaagccttcggatagcatcgctgctggtcctaccactctgggcgacctgttgcgtgcacaaatggaaaaacagaactaagttctgtcagaccataaaaaagggcgacttcggtcgcccttttttgtgcctgaaattcgttgaatcaacaccgagaaccaaggcgtatagcccagtgtcagaactgactatagtcttaagttaaaagcggttcttgtgttgtggcttcagtaaggatttgaatgaacaggcttatcgtagtgctcgcattggtaatgcttgctggttgctcggccaccagcgccaagacccacgccaaacgcggtgtgagtggtatcgaggtagattgctctggcctcggcaacagctggagcaagtgcgaaaaacgcgcggctcgagagtgcaagatgcagggctacaaggtcatcacccgatccagcgatgccagcgacgaagagggtgactatctgttcggttggaaccctgccggggcagtaacccgcactatgctggtcatctgtaattgaggtcggaatacgcctatagccggttgccatctatcctgcggataagttgttcggtgggctgttcaaattcatcaagtcatgctaaaaccttcgaagcgcttttcctagctgcttgaaaaagaagggaaaaatatgacgaagtcggagttgatcgaacgaattgtcacccatcaagggctgctctcatccaaggatgtcgagctggctatcaagaccatgcttgagcaaatgtcccagtgcctggcgaccggggatcggattgagatccgtgggtttgggagcttttcgcttcactatcgcgcaccgcgtgtgggtcgtaatccaaaaaccggccagtccgtcagcctggacggtaagttcgtacctcacttcaagccgggtaaggaattgcgtgatcgggtgaacgaagacgaggaagagggcgtctgatcgactttcaggagaacgttatgctaaaagccaggcgctttgtatcggttgtagctgttttgtttttcgcgctcattgtcgtgacttttgtgttggaaaatcagcaaagtacaaagctgtcatttttcggctggtctaccgttgaactgcctgtttcagtttttacgacgttggctttggtcgtgggaatgatcattgggccagtgctggggttgatagtgggtcgtaagatggctcgacaaaaggcttgatgtcttttcctgcagcatcctgttttctttagcggccgcagcctgagcaggatttgagacgtttatcctgtcatgtatgccatgccctgctggtctagtgaaaaacttgcgcatttgtctgcattaatgctctcgaaaagtcggtctgcgttattctcttgcaccgctcggggcttgcgccccttcccctcaagccgctgccaaggcgccttcttacgcgacatgcatccatgttcgcttttgactttaaggatgcaggccttaaaatggccatcaattttcatccccttcatctttaactgcaccacacaaagcttatttttcgggctgtttgctaacgagcttcgacgttttcctagaacctcttcaccgttgagcattccggggcggcatgttggctttgttggtctgcaggcattgaggtgattggccgactagaagcttgtcgtgctgtgcgcgttgctttaggacttactatgttcagcggaaaaacgcttcttatcaccggtggtaccggttcattcggcaacgccgtcctcaagcgcttcctcgacagtgatattgcagaaatccgcatcttcagccgcgatgagaagaagcaggatgacatgcgcaagcgctatgccgacaccaagctcaagttctatataggcgatgtgcgcgactatcaaagtgtgctcaatgccacgcgtggtgtggactacattttccatgcggccgcactgaagcaggtgccttcctgtgagtttcatcccatggaagcggtcaagaccaacgttatcggcactgagaatgtcctggaagccgctatccagaacgcggtcaagcgagtggtttgcctgagcaccgacaaggctgtctaccctatcaacgccatgggtatctccaaggcgatgatggaaaaggtcatggttgccaaatcccgcaacgtagatgatgccaagaccgttatctgcggtactcgctacggtaacgtcatggcttcgagggggtctgtcattcccctgttcatcgagcagattcgtgcaggtaacgcattgacgttgaccgacccgagtatgactcgcttcatgatgacgctggccgatgctgtggacttggtgctgtatgcttttgagcacggtcgcaacggtgatctttttgttcagaaggcgcctgccgcgacagtcgagaccttggccaaggcactgaccgcaatggtcggccggcctgagcaccctatccaggtcatcggtactcgccatggggaaaagctttttgaagcgttgttgagccgtgaagaaatggcctgcgctgaagacaagggtgattactaccggattccccccgatctgcgtgacttgaactattcaaaatttgtcgagcagggtgaagagaaaatctcccgtacggaagactataactcccataacactgaacggttggatgtggccggcatgcaacggcttctgctcaagcttgaattcatgcaagcgatccagcgtggcgaactcgctacgccggaggaataattgatgaaggtactgatcaccggggccaacggttttgtcggcaagaacctgattgcgcatttgactgagcgcagtgatgtcgaggttgtcgtctttacccgtgacaacagcatcgcccaactgccagcgttggttgccgaggtcgattttgtgttccatctggcgggggtcaaccggccccaatcgtccgatgagttcaaggtgggcaatactgacctgactgtggccctgtgcgacgcgatcaaggcaagtggcaagctcactcctgtgctctacacctcgtcgacccaggctgaccgtgacaatccctacggtgccagcaagctggctgccgagcaggcattgcacgacctgcaggcgagccatggttccagggttcatgtcctgcgcctgcctaatgtgtttggcaagtgggcgcgacctgattacaactccgccgtggcgactttctgccataacatcacccgaggcctgccgatccaggtcaatgatcgacaagcgatggttaacttggtctacatcgacgacgtggtcgagtgttttatccgggtaatggattcgggtttacctcatggcgcggcggctcaggtgagcccaatttacagcattgctgtcggggaactggccgatcaactgcatgcgtttcgcgacagtcgcgaaacgttgatcagcgaagctgttggcacgggcctggtgcgagcactctactcgacctatgtgagctacttgcccgtcgagcaattcacttatgacgttccgaaatacggtgacccgcgcggcgtttttgtcgaaatgctgaagaccaaggacagtgggcagttttcctatttcactgcgcatcccggcatcacacgtggtgggcattatcatcacagcaagaccgagaagtttctggtaatcaaaggcaaggcctgcttccgttttcgccatatcgtatcgggtgagttccatgagttgttcactcaaggtgaacagcctcgggtggtggagacagtgcctggttggactcatgacattaccaatgtcggcgaagacgagatgatcgtcatgctctgggccaacgaggtttttgatcgtgagcggccagacacctttgcgatgccggtgggtactcaagcctgagcatgagcgcatcaggcaatgcatggcgcgaacagctccgatgccaatgattctggaagagtgttgaaatgaaaaagctgaaagttgtcacagtcgttgggactcgtcccgaaatcattcgcttgtcgcgagtgattgccaagctggatgaacactgtgaacacgtcctggtgcataccggccagaactacgattacgaattgaacgagatttttttccaggacctcggtattcgtaagcctgaccattttctcaatgcagcgggcgcgagtggtgcgcaaacgatcggcaatgtgatcattgcggtggaccaggtgctggaggaggtgcagccagaagcccttctgattctcggtgataccaacagctgcatggcggtgattccagccaaacgccgtaaaatcccgacattccacatggaagccggcaaccgctgtttcgacatgcgtgtgcctgaagagatcaatcgccgcatcgttgatcacaccgcagacatcaacctgacctatagcagcatcgcacgtgactacctgctgagcgaaggattgccgccggatcgggtgatcaagaccggtagccctatgtttgaagtgcttaaccattaccgtgatggtatcgaagcctctgaagtgctcgatcgcctcagtcttgaggcgggcaagtttttcgtggtgagtgcccatcgcgaagagaacattgattccgacaaaaacttcctcaagctggtcggcgtgttgaacaccgttgctgcccagtatgacctgccggtgatcgtgaccacacaccctcgtacgcaaaagcgtgtcgatgcgatgggcgtaacctttcacaagaatgtgcaattgctcaagccgctggggttcaaggattacaacaagctgcaactgacggccaaggccgtactgtccgacagcggcaccatcaacgaagagtcatcgatcctgaatttccctgcactgaatctgcgtgaggcccatgaacgaccggaagggatggaggaggcggcggtcatgatggtcggcctggaggttgagcgcgccctgcagggcttgcagctcctggaaagccaggccgctggggcggaacggacgttgcgcttggttgccgattacagcatgccaaatgttgccgaaaaggttgtacggatcatccatagctaccgtgactacgtcatgcgcactgtatggaagcaatattgattggacagcctctccccggaaaaaccactgaagattctggtggtcacccagtatttctggcccgaaaacatgcgtatcaacaacatggtcgaaggctttgtcgccaaaggtcatgaggtgaccgtcctcacgggcgtgcccaactatccggaagggcaagtctttgccgatttccggcgtgaccctgcgcagttttccaattatcggggagcgcgagtgatcagggtgccgatgctggcgcgaggcaagagcaatttcagactggccatgaattacctctcgtttttcagcagtgcctcaatcattggcagttacaagctgcgtggtcaggcgttcgactccatctttgtgtatggcgtgtcgcctatcatgggggcgatcccggcgctgttgcttgggcgcttgaaaagggctccggtacttatatgggtgctggatctttggccggaaagcctcagggcggttggggttatagaaaacccgaagttgcttggactggttggcaaggtggtgtcctggatctacaaccgcactgattacctgttgttgcagtcacgttcgttcgacgagaacgtcaaggagtactgcacacgtgcaattgatgcagaccgactggtgtatttccctagctgggctgaggatgatttttccgcagagctgcaggggccttcggagttgctgcagcgtgacgatgctgtatttacaatccttttcgccggtaacatcggcgatgctcaggattttccagccatcatggcggcagtcaaggctgtcgagaccgatctgcctgtgcgctgggtgattgtgggggatggtcgggcaagccaatggctgaccgagcatgtggcgcaaaaccgcatggacaacgtgctactgcttggcagacatcccttggagaagatgcctgcgttgttcgccgtcgcggacgctttgctggtttcgttgaggacaaatgacgttttcgagaaaaccattccaggcaaagttcaggcttacctggcttctgggaaacctgtaatcgccatgatcgatggtgaagcggccaacgttgttgaaggatcgggtgcgggcatggtgtgtcgttctggcgatgcccaggggttggcgcgtatcgttcgcaccatgggcgtcttacccaagtccgagcttgagagcatgggcctgttgggcaggcgttactaccttgagcatttttccaaggacaccttgttcgatcgtcttgaggcgctatttagaaaagcgaccttgaggcgtaaccaacaatgaccagaaccctttgcccgtctctgtttcaggaattgtttgcgaaatgaccctctggttcgtgtttgccgcagtactcctcgtatcacttttgttgacctgggtactgcgccgctatgctttgtcgcgtagcttgatggacattcccaatggtcgcagctcgcactcggttcccacgccacgaggaggcggggtcgcaatcgtgctgactttcctggtggcgttggtgctcgttgcgctcgctggctgggtcagttggaatgcagcatggccattgctgggggcgggcgcattgatcgccgtggttggctttctcgatgatcacggccatatcgccgcacgttggcgcctgttggcccatttcgccgcagccatttgggcgttatgttggatcggagggctgcccaccatcagtctggccggggttgaattggaccttgggtggttcggtcacgtgctggcggctttgtacctggtctggatgttgaacttgtacaacttcatggatggtatcgacggcattgccagcatcgaggccgtctgcgcctgttcgggagcgtgcctggtgtactggctgacagggcatgaaagtctcatgcttgcgccgatgttactggcagtcgccgtgcttggattcttgtactggaactttcctcccgcgcgcattttcatgggcgatgcgggtagcggcttcctcggtgtcgtaatcggtgtgttgtctctgcaggcggcctgggcggcccctcagatgctgtgggtctggctgattttgctgggtgtgttcgtggttgatgccacctttaccttggggcgacgcctgttgcgcggggataaggtctatgaagcgcatcgcagtcatgcttatcagtatgcctcgcgccaggccgggcgccacttgccggtgacgctgacggtgatggcgatcaatctattgtggctgctgcccatcgctcttttcgttggccttggttttgacggtgttcttgggctggtggtggcgtatgttccgcttgtagggctggcgatcaagtttcacgcgggcgagttggaaaaagtgtgatcattggttgacgctggtgtttgaaaaggttgctgcacacgtacgtgactgccattttttgctggcagcgctagggactgaggtataaaaagggtttatggatagtctacgtgcccgattggtgggcttgccgcgcaggcaaaaacgtttcttgcaagtagtgaccgacatcgtcctggtgtggggagcactgtggctggcatttgtcgttcgcctggggtttgatgatcttaacaaccccttcgtcgtgcatttgtggttgtttctcagcgcgccggtaatcgctatcccgttgtttatccactttggcatgtaccgtgcggtcatgcgttattttggcaatgatgcgctgattgcaatcatcaaggccgtgagcctctctgcattattgctggcgctggtggtgtacctgtacagcaatcaccagacggtggtgccgcgctcgatcgtattcaactattggtggttgagcatggtcatcattggcggcctgcgcctggccatgcgtcagtactttcaaggggactggtttactgcggcgcaacacgtgccgttcaccaatcgtgatgatggcttgaccaaggtcgctatctacggtgccggggccgcaggtaatcaattggtggcagccttgcggctggggcgggtaatgcggcctgtggcattcatcgatgatgacagcggcatctccgatcggatcatctcggggttgaaggtgtacaagcccaagcgtatccagcagatgatcaatgagactggcgcggaagagctattactggccatcccttcatccacacgggctcgtcgccgagagatactcggttatctggagggatacccgctgcatgtgcgtagtgttcccggtttcatggatctggctagcgggcgcgtcaaggtcgatgatatccaggaagtcgatattgccgacctgctgggtagggaccctgtacctgcgcagcccgaactgctggagcgatgcatcaagaatcgcgtggtactggtttccggcgcgggcggttcgatcgggtcggagctttgccggcagatccttacgctggaacccaccagcctattgttgttcgaccacagtgagtacaacctctactgcatcctgtccgaacttgaacagcgcgttcaatcagaattgttgaatgtgacgttgttacccatcctcggttcggtgcgccatccggacaaactgctggatgtcatgaatacctggtcggtcgacacggtctaccatgcggcggcctataagcatgtgcccatggtggagcacaacattgccgaaggcattcttaataacgtgatcggtactctcaataccgcgcaggcagcgttgcaggcaggtgtcgagaactttgtgctcatttcaaccgacaaggcggtgcggccaaccaacgtcatgggcagcaccaaacggctggcggagcttgtgttgcaagcgttgagcaaggaattggcaccgacgttgtttggtgatgcgtcgaatatctcgcgcgtcaacaaaacccgtttcaccatggttcgctttggcaacgtactgggctcttcaggttcggttatcccgctgtttcataagcagatccaggcgggaggccctttgacggtgactcatccgaagataacccgctatttcatgacgattcccgaggcggcgcaactggttatccaggcgggttcgatggggcagggcggcgacgttttcgtgctggatatgggtgagcctgtgaagattgtcgagcttgctgaaaagatggttcatctctcgggcttgagtatccgctccgagaaaaacccgcacggagatatcctgattaatttcagtgggctgcgtccgggtgaaaagctgtatgaggagttgttgattggcgacaatgtagcggctactcgtcatccaatgattatgcgagctaatgaagagcttctggggtgggaagtactcaaggccaggttgcacgggttattggcggctgtcgaggagggcgattttgcgctcgtcaggcaactcttgaaagaaaccgtcagtggctatagcccggaaggtgagatcgtcgactggatgcacattcagcgacaccgtgaagtctgatcatctggtggacgctctgatgggcctatttggaggcccatcaggtaaaacttaagttaaagcttccagagttttttgttcagtctgaagctcgataggtagacgaacagtctcgatatgttcatgaacctgttagggcctacagtgtaaagaaccacctttagcaacgagttgatgatctgaagctttccagagtgattttgtgcgtcaccaaatcctgccggtttgtatggcccgcctttttcgaacaaatagttcttcttggcaaattggtagacagggccgctcgcatcgaacggctcatgctcggcaggcagttcatccagtacggcggcgtaggcccttctcagcgtgggcgaaatgtatttcccatcgctcatataatcaaaggcataggctgcgttggaagggaaggctgaaaagttggacagccgttccttgtaatagaagctgacctccaacagatcttcacgtttttcttctcttcccgcaaatgctcgtttgctcaagcgttccggattcttctcgtcaaacgaactgaagtggaagaaaaccagcgggaactctccatttaccgtatagccaccctggccgtcaggggcgagggtgcgctcatggctattccaaaaagccatgttgtagccaagattgaacgatacgtgcagggtcgggaagaagcagggggcgatgctgacccacttctggtcggtggagaggccaaactgagtttcgaaatagcaatgttccagacagcgttcattccaccactggagaaagcgtatgccttctgacgtgtttgaaactgcgtagaagcccagattgaaggagccaaagcgcagcatcccgacatcaccctcgacatgaggcgtgacgtagtggggcgttagaatgatgtcacgcgtaccgagttcgtcccataggccatcgaggcggctgaaaacgcacgtgtcggggtcgaggaagataaccttctcgtgttgctcaagcagctgcaaagtgatccagggcttgagactggtactgaactccacgatgtcgtatttaaaggcgtagtgctggacatttggcaatccgatctcttcaacccaatggaactctgccaggtgggtggggagatccatctcgaccttgcgatcaaaaatatagatcttcagtttaggctgaccgaatttaaccagcgactcggccagcaccaacgctttggacaagtaagccaagttgcacacagtaaaaatggctgagcgctcgacggtcatgcctttttcatcagtcacgtttaaatattcctaatgtattgattactctgacgaggatctgagacgtgcagtagagggtcagtaatcttgtgattctgagcgcgaagctgaactgacagctcgcgagcgcagaaaaaataagtttcaggttcgaagataccgtgtcttttattctggaccatgaatacgcccgcattgaatacgtacggccagcaattcggtagcgactgtcagcctgctcggtcacatgatcaaagccaggtgtggcgccacagacgccgattcgatagcctttattcaatgaatccaggcacagcttataatccacgctgtcgacaaagtagctgcaatccatccagcctagagcgttgagtttatccagaaaataaagactgccactgttgatcagtaggggcacatcgcgtacagacgcgcttccatcggccttgaaagcgatcgcgctgaacgcattgtaagcgtcgaggtggtcggtatagtttttttcgacatgggccagtgtttcttcgttgaaccccgtgtcctgatcaaaaaacagaagtgccgagtggccctgttgataggcgttggcgcataccgttgaaataccgatgcccagccccagatttttaccgcaggtaaaatagtggatctgcggatgatgttcggcgaatgcccgcacgctggcattatcaggtgaattgtcgaatacatagacttcaaacccgtttgccgaagtcaattcaagcctgtgcagtaattcaacgccggcgtgatagacaacaatccctacagcaatcttacgtgtcatgccatacctttgatatgtggagccgcccgtacccggtcgtgtttatacacttaaccatttgctctctttatcgctccatactttcacaaccctggcagggcagcccacggcaatgacgttgcctgggatatctttggcaacaacgctattggcaccgatgatcgagccactgccaatggaggtgttcggcaatatgacgacattgtccccgatccacaccttgtcgccaatggtcacagggccgctgctggacagctttcgttcgaacggtgtttcgtaggggctggactggtcctcccccgagtacgcgccgtgggagtggtccgtgatatggatcttgctgcccatcaacacatcgttgccgatggtgaccttgttacaacaggcgatatgcaagtggtcgctggcagagaaattttcgccgatttcgatacggggttgataggtgaacgcaaggtattgaggaatggcgtgtagccagagtccctcacccaccctgaagttgttacccagtgcgatattttccagtccaaataccttgggcgcacggccgaggtaggcgcgcctgcctggacccggaatcgtcctgaggtgaatgagcgcgcgccacaccaagagaaatctccccgcaagtagcgggataatgaacaggtggtgttgttttaatttctttagaatatatgacaccgcgtttactcgtacttgggtgttaacggatcttggttggctctggactttattgatgtccggatccaggcggctgattgcgtgtaaaccgaagataagtgtcggccatggctttaagcagggggcggggggtaagtgaaataacagcgacaatcaggagtgggtagtcgatggacaagcgtaaggcatgcttgaattgcctgtacgtcgaatagctcaagagcccacgaacgcgcagagataccattccccttaccgaaaaagcccccgacacggcgccgaaactacggcatgcagaaagtttgctcttcagtgcatagctcgatggcagtgagaaaataaagttcacccatttttccaccccaacttcaaatatttttggcgtatgtgcccagcctttcttttgcagggttgggctctctagtgaagtaatagatatgtctcgctcccatcggataactgcattgccacgcgccgcatgttccaatatgaccccggtctgcatgtagtaagaaccgatgtagcggttgaagtccgctgtggcgatcagttctttattataaatcaggcagctcatgcagctcattattccggctagctcggtcaacaaagcatccgggcaactatagtcttggctggctgttgtgtttttatcgatgagattgacgactattgcgctatagctatctgagctttcgattagcttgagtacggacacgatacctttttcggggatttgcgacgtatcccccaagagccacacgtattgggtgtccgcagccttcagtgctttctcgaaattggcctcaggacccagtgtggtcgcgttacgcaggctatgaataaagccgtattctttttgccacttcgcgatcacgtcctgtgtgttatcggtcgaggcattgtctgatatgaaaatttgtaggttgtggctgcgggctagcggaacgtgtaccgacagggatttatctagaaagtccgctcgattgtaggacggaatgacgattgagagagaggggttgccaactggattcatgcgtgcgatctcttgaagtttttaaatatccagtacacccagggcgtcaccaagcaaagcgcgctaaagaaaccgagaaataggtaatcgaagggtagataaatggagataaccagcgtagttgttgctacatacacgccttgtaccacggacgcggtaaccagcggctcttgtttgtgagcccgcatgtagacagccatcgagttgatccataactggatcaaccagccaaatccaaccaatgccaaggcgacatgtgacagcaggcgatttgcgatcggcaggtaatccttgaggagttcgatgcctgtaaacagagttgccaagcccagtatgtaagtcaccgtggcgagcaggagggcgcgtttgaaggtggtgtccagcgctgggtaatcttgctgtgcaacatacatgttcatcttgggtgtgttgattgaaacccagatgtttgcgatgctgaaaagcgccatgcatatcgccatcgatagacccacttgtccagcctctactgttccgtaaaagtggaatgccaaaggggtaaagatagacagaataaaataaccacttatccagctgacagcaaaccgccacatcagtggcatgatttctggcgcccacgcgtgttgggcatgtttaccggcggtataaagctgttgaagcatttttttatagcggcagccgatcaggaccagcccggtcgtcgctccggctagcagggctattgcaagggcgtaaagctcttccccgcagaacagcagaagtgcggtcacggtgactgtgcttacgctgatgtagaaccggattttttgcacatctccgacgctatcgcacccttcgataaacgacagtaacatgctgttcaggaagaccaatacggacgctgcaccatagatgagccagggaaattgccagttgatagctgaacccttgctattcaggaaaacatacccggcccctaataccagggggaaaatcaccatggccattgcacttgaccacttcaaggcaaatttgccaagggttgccaagcggatcatgtgcttggtatcaccggtaagcgttttatcagggttgaacttcaggtgcgcgaattcgtgggatgaaaacagtaaaagtattgacgaaaaacccatgtcagcgaacacagccagggctgccaggctaataaaggtgtaccagtagccttgggcttctgcggagaggtaaagggggactaacagcagtagcagagggccggaaaacaatctccagagctgattgatggcggagtgtcggacatcgtagctcagtaacgttttgagcagcatatttttcacggctgatggcacattctatttttcaacttttgagaaggctggagttttatcaggggcgctctacatacatacgcgctgcatgtaagcgtgcccccaaactgagtggctgcaggttactatttcccggccagctcttttgcgacctctatgatcaggctttcctggccagcaactgccttgcgttcacccagtcggaaaaacacgtcccttgggtctacaccaaattctgcggccgctctggccacgggtttggcgaagccggaaaatactccagcaagaccgctcacgattgagactggggaaatggagggtgcgataaaccccagttccttttctgccatcgtggcagcgtctaggattttgaatagatcaatcccagtgtcatatccgagtttgtgcaacacccctaccagcacttcaagctgtgtattgccggcgccagcgccaaatccacggatggtgccatcgagaattgtcgcgccttcattgaccgctgttacggagttgattacagccattccaaggttattgtggccgtggaagccaactgggatggacaggccatttaccaaagtgctgatgcgagctttgacatcatccaccatctgagcgcccgcagagtccatgatgacaatagcctgggctccataggactccattttcctggcctcttcaagcagcactgctgggctggccatatgcgtcatcatcaggatgccccatgcttccttgcctgactctcggatatagccaatgtggcgctgggtgacatcagcctcggtgcagtgcgcggcaatccggaatacgtcgacacccagttcgactgccttgctcaggtctttcttgatggtgcagaagcccgggataacatggattgccaatcgagtgttgctcagatgctcgcgggagattctgagaatttcctggtcactgagccggctctctccaaccagcatcgacgagccaccgaggccattgccatggccgacctcgataatgggtacattcgctacctccgctgccttgcaataagcgacgaacgcttcggctcccaatttatgccctaccgcatggttaccatcacgcaatgttggatcggtaatgagaatttgcttaggcatgcaggttttccttggcgtgaaaggaggtcgcgatcatttctgcgacagcaatagcggcacagttgatgatgtccaggttgccggcatactgcggcaggtaatcgccgttacccacgacctttatagtcgtcagtactcgatctccttcaaccgttggtgggacgatcagcgcataaccgggaacatactcctgcagctttgcgaccattgcgtctaccgaatgacggatagcaggaatatcagggttggtgatcttggcgtagatggtcgtttgcatgtcgatcggcgggttggccgggttcaggatcagtatcgccttcgtccgctgtgctcccgagaagcgcattagcgcatcctcggtggtctctatgtactcatcaagattggcccgagtggccggccccgcactgagtgatgcaatgctggaaacaacttcgatgtattcaacattggcatgaacggcagcaatcgcactggcgatgggaatggatgactgcccgccgcaggtaatcatattgatgttctgcgtatctccgcctacacattccctagcgttgatggcggggatgcagaacacccccagctttgccggtgtcatgtcgatgactgtctttccgagcttgcgcaatgcatcccagtgctcaacatgtgcatgagcggaggttgcatcaaaaaccaggtcgcatacatcaggcgacgagaggatcgcaccaataccctgatcggatgttggaatgcctagctcggcagctcttttcattcctgccgacgagtagttacgcccggcgaaaagcgtacatacaagatgctgagagcgcattatcttcacgagcaggtcggtaccaatattgcccgaaccgataatagctactttcagtacttttttagtgaccatcacatatatccaaggaagcgcagaatcaaagcaagccgttattttactcgtagctcgttgatctcaagcgcgtgctgtgtttcgtgcaaaaagaagaagttggtttctagcgtctggtcatccatcaggccaaatgcacggagatttccctccgcgtcagcggtgaagcattggtagcccagtccctgaaaaagctcgatgatttggttggggtggtagtcaaattttgctgcccattttcgcagcatttccgtgaatacaataggcttgtcctgggccaacagtttcagcgcaccctggaagacaaaaagctcggccccctcgacgtcacatttgataaagtcgaccttgggcagacccagtcgtgttgacgtgtcgtcaagtaccttgacatcgcaggtaatctttttgacgtcggagcgcccgctcaagttggctgaagaggcatttcccgagcctcctgggtagaaatagaactctagggttttctcttccgaagagaatccaaaattgaaggtcttgatattgtccagctcgttgatgcgcacgttttcttggagcgccagatacgtggaatcaatgggttcaaacgcgtagacattgacgcctgggttctttttggcgatgttgagggcataccatcccatgtttgcgccaatatccaatacgcaggcatttggcttgaccagtttcatgatcatgtttgaatctgtcagctcataatcgccaaagttgagaatctcaaccggcgcaacacgcttgtcaaactcggggcatacaatttttataccattgtcgcgtgaggtcatgaccaccttgccatcggtgatttctatgcgggcaacgtttgtttcttgcaaccatgatgcataggaaaagagcttgctatggaagtcactgtacattccatctatatagtcaggtttgctcaacacttggttttcaaagcactgacgcatctcttccatgttcttcatgtgtaactctcaatggttttcttgaagccctcacggacaggcgtccgggggagccagccgagcttttcgactttagtgatatctgggcagtttctgacaattgggcttactaagtacgtactgtcattttcgcggggagcaagcaaaacgctcaattttttttcggggtatagctctaccagtatttcggccagctctccaatactgatttctcccgcggggttaccaatattgtatgcctcgccgtgggtgccgttgagcaataccgtccagaagcctgctaccgcgtcggctgcatagcagaaggcacgtctcgcagtaccatcgcttttcatggtaatgggctgattattcaggatattggccacaaaatcagcataaacccttccgtcatttaatagcatgtgagggccgtaggtgtgaaagggcctgacgatggtggccggtacgccagcttggtggtgccaactgacgcacatgttttcacccattcgcttgctttccgcgtagcaagcacggaccgaggtcgggtcgacaaacccgaagtctccctccaaggtcggtaccctatcagtctgtccgtacacctcgccgctgctgaagaagagaaaccccttggatttgctcagggctgcaagtttcagcagtgcagcggtccctagtgtgttggcactcaaggtgccaattggatcggtcgaataatacttggggctggcctgactggcggcatgaatgatgtagtcagggcgcacgtcgaattccaaaggattactgacgtcttgttctatgcaaactaagtccgatctgcctaacacatgcgcaaatctgctctcgaagcgctgccggctacgaaccagggcaaagatctggatctccaacccttgtgtttcgttgagaaacaacagcgtttctaccatgtaggcggcgagaaaaccggaggcacccgtaatgagtaccttctgccccctcagacgatgccaaggtaacgggtactgggtcgtaatcgctagcagatcgctcgcgacgatggcattgcgcaagatcttttccatgggagggcttacgcgcccagcgtcttggatttttcatgcatgcccttgagcatggcactctccagttgatcacgtggaatcagtggcgagagatcttccaggggtggagagaccagcgaaccgtcttctttcactatcacggaaagtttcggtgagaacagttgctctgggtgcataaacacctcgcagataatcggtccggtcgcggcctgcactttttccaatgccgggtccacgtcatcccaatgacgaatctggcaagacgggatgccaaagccagttgccagttttgagaagtccgggcacgaaacgcccgaggtccgatcagtccccacgtaagaacctttgaacaaggagttctgagtgtgcttgatcatcaagtagccatcgttgttgaagatgaaaagcttgatcggcaattggtggtgcacgattgtctgcagttcttgcaggttcatcatcatgccgccgtcgcagttgaggcacattacctcacccctgtccgtggcgaacgatacccctagtgctgcaggcaagccgtagcccatctcaccgaggccggtagaggtcatcaggcgctggccatctttcagacgcagtacctggtgcccacacaacagggcggtacccatatcggttacaacgatctggttcggcttgaatacgccgttcaggcgctccatgaaacgataagaatttatgaagccgtctttgtcagcatgctcttcacccacccaagggaattgagcttcataggctttacattgcgccaaccattgcgatttgctaggaattaccagtgtctccagacgagcgctcaatgcctcgataaaggcggcagcgtcactgatgatgacttcgtgtgtgcgtgaagcattcttgatcgcctcttcacgactgatatctaccacgtcgatccttgcttcgcgcgccagctcggtcaggtcataaccgacctgtggtatggccagtcgagtaccaatggcaagtatgtagtcactgttttgcaggataaagttagccgagcgctggccgtagacgccagcgcgtccgaatatcaaagggtgatcggagtcgatcatgtcgatacccgcccaggagacaaggcccggagtaccgagtttctccaggagcggtgcgatacgcttttcggcgccagccaggcggatgccgttgcccagccaaagcagtggccgttcggctttgagcagggcggccacgacgctgtcgacttgggcgcccacttcagcgctgatcgttttatcggtaacgggcgtcgggaaatgcgccatttcgttggctggaatgcggctggactgtatgtccattgggatttcgatccaagttggacccgggcggccttccagcgccacgtatgcggctttttcgagctcgtagacggcctgctccggctgggtgacgcgttgagtgtatttgcagacccggctcaccatctggcaggagtcgtagccctgaacgccccacatgcgcaaagggttatccaccgagcaatgcttggagtgctcattacccgcgatgaccaggcacggaatggagtcggcccaggcagacaccactccagtgacgccattggtggaaccggcgcctgtggtcagcaatgctgcggaaagacgaccattggtgcggtaataggtctgtactgccatgcaagcggcctgttcatggtgcacacagacaatctcggtgtagccacgacggctgatggcctcaaaaagatgaacgttaccggcgccaataatcccgaacgcatgtgtaatgcccaggttttccagtgcttcagcaatctgctcactaactttgattttttccagcgcttgcattttaaaactccgtcgatggacgcttcagcctgctcgaagaccagtagctgagttttgaaaaattatgggtgaggcacccatgtcttttggggcgtttgctggtcaatcaccatcccgaactcgagccgtgggcgacactctcgtgcgtcaggcatgatgacctctatcaacatggggcggggagcttccaaaaactccctcacagggacgtgaaagtcggtatcccgcgtcacgaccctgccagtgatgccataagcctcgccaatggctttgaattgagacgtgtagccgttccagtaggtggatgatgttcgaccctcaaagtacatttcttgaaagccgtgcaccatccctaaggaatgattgttaagcactattatcagtatcggtagttggtctcgcgcgatgatatccagctcttggatgttgagctgggcgccgccgtcaccggtaatgacaatcacaggcttgttaccagcgttgcaaacgccgatggctgttggaatcgcgaaccccatggcgcccagcccgcctgagtgatgcatagattggccatgacttaagcgtagtgtgtgagccacccacatctgattgttgccgacgtcggcaacataatcgacagcttggcctctggcctgctcacaaaggctcgaaaaaatcacgaaaggactgaccagccagtcgctgtactcgtccacaaagctgatctggaagcgggcacgcaattcggcagcccagacaatccaagcttttttattctgcacttgggaaagggggaagtgggcaaagaaggtgttcaattccatcacataggacgcgtgtgtttgaacccggttgttcaattgcccttccatcaggtctatctggataattttggccttgcgggcgaaatcatccggttttgcgccggtttgtcgaacgtccaggcggcttcccaataccagcagaaaatcgcagttttgtacggcgtgattggcagcacgcgtcccgtaggcgccgagcatgcctaggtagttcgcgctcgccgggattttttctgcgcctttcaaactggctacgtaaggaagatccagggcctctaactgcccgagccattgcttgaagtggcgggtattgaccgcccctccacccaaaaggatcaagggcctttcagcggatgccagtgcattgctgatcgcctcaatgtcgtattcactcagctgactcaccgcctgtttgtcactcagtgccaacagtccatttacgacgcggtcatcaatgtcggctcgctgtatatccatcgggatgtccagcaataccggccctgggcgtccttccctggcgatgtcgatggctttttgcaggcagggaagtaactcgtcgacctgtgtgacctgataggcgtacttggtaatgctgccggctagtgccacgctgtcgagctcttgaaaaccctgttggcggatgtgcctctcgcctttgagttcgtaggtattgacctggcctgtgagaaacaggcaggggtggctgtcaagccagcagtcggctatgcctgtcattaggttggtggcgcccgggccgcttgtgcccagggccacgccgagtaattcgtggtgcgttgtacgagcaacgccggatgccgcaaatgctgctccttgctcatggtgaactgataccagcctggtcttgcccagcttattgatgctgtcaaccaggtgcgtgatcatcccgccgatcagttcgtaaccatacagaaccttgttctgtgcaagaaccagcgccacggcatccgatgctttcatcgcctagaaaccaatcccgaagaactcttccagcttctcaccgacaaaatcgaaatgctcctggcccagcgccggctgcacgccgagccagaaggtctggttcatggtgcggtcggtattggtcaattcgccaaccactcggtattccagattctggaagtaaggctggcgggtcaggttgccggcgaacaggaggcgtgtgccgattttgtgctggtcaaggtacttgagcaggtcgacacgcttgacgccgctgctttccttgagtgttaccgggaagccgaaccacgatgggtcgctgttgggtgttgcctcggcgatttcgaggaattcggacaggctggacaagcgctctttgagcagcacgaaattgcgcttgcgcgtgtcgatgaagtcctgggcgcgttcgagttgcgccaggccgcaggcggcctgcatatcggtgattttcaggttgtagcccaggtgcgcatacacgtacttgtggtcatacccttgaggcaggctgccatattgctggccgaaacggtcgccacaggtgttgtcgcagcctggcgcgcagtagcagtcacggccccagtcgcggaacgactcggcaatcactttgagcatcgggttgttggtgaataccgcgccaccttcgcccatggtgatgtggtgcgccgggtagaagctgagggtggcgatatcaccgaacgtgccgaccagcttgccatcgtaggtggcgcccagggcgtcgcagcagtcttccaccaaccacaggttgtacttttcgcacagcgccttgaccttgcccaggttgaacgggttgcccagggtgtgagccagcatgattgccttggttttcggcgtgatggcggcttcgatcaggtcggcattgatgttgtgggtggtcatgtcgacgtcgacgaacaccgggattgcgccaaattgaacgatagggttgaccgtggtcgggaagcccgctgccacgccaatcacttcgtcgccctttttgatcgcccgctcacccagtttgggcgaggtcagggtgctgaaagcaaccaggttggcggaagagccggagttgaccgacagcaggaatttgacaccgaggaattcagccagctttttctcgaattcagcattgaagcggccggtcgtcagccagccgtccagggaggcctcgaccatcagttgcagctctcgtgccccgatcactttgccggacggcgggataacggtctcaccggccacgaacggcttgctcgccaatgcgaccttggcgtattgctcgacgagcttgctgatttcctggcggagcatatcgggtgtcatgaaaattcctgctaaaaaatagagttagttgctgttggcacgcatggcgagcatgtaggcgtcgatttcatccaggcaatgggcctgcatgtcgttgccgctcaaccaggcacgatgccaggtaacaatccgggcgagcgtggttgcaaggttccagctgggtgtccagtgcaggtgcgcgcgcgccttggaaatgtccagcttgaggtagttggcctcatgcggctgcgggtcctggtccaattgccaactggcccctgtgccccaggcctgaaccatgtgatcaaggatccattccaccgggcgtgcgtcttcatccttggggccgaaattccagccctgggcaaagtgatgcccttgggtccagaggtgttcagccaacacaaggtatccactgagtggctccagcacgtgttgccacggccgggtggccttcggattgcgtattgtgacgggctgacccttctcgaaggcacccagaatatcaggtatcagccggtcttctgcccaatcgccgccgccaatcacattgcccgccctgccggatgccaacgctgcgccttgcggatggttgaaaaacgacttgcggtaggcgcttgtgatcagctccacacagcctttgctgttgctgtagggatcatggccgcccatgggttcgtcttcacgatagccccattcccactcacggttctcgtagcatttgtcggtggtgacgttgacgatagcccgcaggttgggacattgccgcgcagcctccagtacgtgcaggctgcccatcacattggtggcgtaggtctcgaccggctcgcggtaagacaaacggaccaatggttgcgccgccatgtgaatcagcacgtcgggattaaagcgcgtcatgctttgggtgatggccgccaggtcgcgaatgtcgccctgctccgactccatgccttcggccaccctggcctcgacgaacagggcagggtgggttggcggcgccagggcaaagcccttcacctgtgcgcccatgctggtcagccagagtgacagccaactacccttgaacccggtgtggccggtcacgaagactcttttgccttgccaaaaggcaggagaaacggtcgacttcatattcagtcccaggatttccagggcgctttgccggactgccaaagctcttccagatagtgtttgtcacgcagtgtgtccatgggctgccagaaccccgggtgttcgtaagccatgagctggccttcggcggcaagcttcatcagcggctcctgttcccaggtggtgctgtcatcctccaggtatttgagcactgcggggctcaagacaaagaaaccaccattgatcagggcaccatcacccttgggtttctccttgaagttcagcacttggcctttctggatatccagcgcgccaaaacggccgggcgggaacgttgcagtgagcgtcgccgctttgccgtgcgacttgtggaaggccagggtcgcgccgatatcaagatcgctgacgccatcaccgtaggtaaagcaaaaggcttcttcgtctttgacgtagtcggcgacgcgacgcaggcgaccaccggtcatggactcgtcgccggtatcgaccagggtgatgttccagtcttcggcgcgttggtcgtgcaccttcatggtgttgtcgcgcatattgaaggtgacatcggacatgtgcaggaaatagttggcgaagtattccttgatcacataccccttgtagccacagcagataatgaagtcattgatgccgtgcgcggagtacatcttcaggatgtgccagagaataggtttgccgccaatctcgaccatgggttttgggcgtacgctggtttcttcgcttagccgcgttcccaggccaccggccaaaataactgctttcatgctgtctccgggtcaattcgagcttacaaaggcgtcagaatggaaatgtttgaggggcaggccagcctgcgtcagcagctcgcgtgcggcgtggatcatggcttctgagccacaggcatagaccgaggtatcggccaggtcaagactttctgcaaggacggcctgttgaacgtagcctgttgcaccgggccattgtgtatccgcacgtgagagcacggggcggtaggtcaggcccagcgatggaaaatcaggctgccagtacaagtcctgctccgtacggccgccccagtacacgtaaatgcgtttgccgctgagtgtttccggtgcgtcactcaagccttcaagcatggctttgaccggggcgattccggttccggttgccatgaacaccaggttcgtcgtgcttgcactgcgcaagcagaaggtgcccagcgggccttccagcctgagcaggtcattggcttgggctccgccaaaccagtactggctcatcacgccatcgggtacttggcggatatgcagttccagcttgccatcctcacgcacggcattggcgatggagtaactacgtcgcacaccgtctttgcctatgacgtcgatgtactgccccggaaggtagaagagtgcgctttttggaggcgttcggaggacaacccttagtacgtcgtccgccaggcgctccagggtatcgaggcggcaaggcatggttttgatctggatgtcggccagcaatcccaggtcttcgatgtccaactcgacatcggtgacggcggcccggcagcacgtcaggatggaaccgcaggcacgctcttcttccgtcagcgcgagttccggttgcaccacctctgtatcgccttgaagcacgttggccttgcacacgccacaacggcccgtacggcaactgtattccagcactgtgccttgggacttggcgcaatccagaaggctcttgccaggttcagccgtaaacgtcttgtggttcgacaatgtaacaatcgacatgcgtcaggcaccatgctcagggttggcgtcgcaaggattcgactcgtccactggagtgcgagggacggccgccatcggcccgatacttttgatacccatgtacgtatacatctcctgtcgtcattgccctgaaagtcatacgacattcagcgcgcagactacgcccctggccggggtcatttttcgtagagtttaaagcggatagaagccgctggcggaaggccccaccagttgaatcgcatatacaactcgcagcaacatcgcagcgtgttgctgattattgaataacggactgcctattgatggcggcaattctacctgcttgggaccgtaactggaaatgcaggatatccggggcctgcccaggccgtttcactggcattgagtgggcgggtcatacgctgttaccgatccgtttttgactccttccaaacatcacctaagtttgaaatgcagcttaggaaagctgcatttcctttatcgatgtcatggagtgtcaccaatgcaaaacgcctatatcgcctccttaatcttcgccttcctcaccaccctctctgtcaccaccaccgcagcgccctccgtcaaaaccgaggctccaatcccgatcacgacccaaatgtccaaggcagagcaatccgccaaggtcaatctgaacgccgccgatgccgaaaccctgcgtcgtgacctctttggcatcggcgccgccaaggccaaggcgatcatcgcctaccgcgagagcaatggtccgttcactgctgttgatgaactactggaggtgaagggcataggcaaggcgctgctggagaagaaccgcgaaaggattgtaatcaactgagcacaggacggccggtcaccgaccggccattccatcatccgaaacctgtgccttcaggctttcccttactacgtccagaatacgcaccgccagcgctgcgctttcgacacttctggccagcgccaatgcgcccactagcgtcgacatcattaccaggctttcttcatcggcattcgtgctaatcagcgtcgcttccacctgctgcaagcgcgccctcagtaccgcgtccgtggtcggactctgctggcccctcaaccccaactccgagcacatggtaggcaatgggcaaccctgatccggcgaggctcgatgccattcagataagtaactatcaataaatgcctcaagagggcgttcctggctgaacaacatttcgcaatgcgcatccagctcggcagctgcggcttgcagcgccttttctaccagttcgtccttggatttgaagtgggcatagaacccgccatgcgtcaggtccagagccttcatcaagggctgcagaccggtcgcgccgatcccgtcgcgacgaaagcgtacagaggcttccttgatgatgcgttggtgggtcttggctttgtggtcggatgagtaacgcataggtgggcctcagtgacaggctggcattttaaccaacttgaatctttttacacgctgacacgttggcatgaaaagtggttacctacccatcgaagattgttcaacaatcatgaaggtagccatgacactcagtttgtctctcgccgaccagattgccctggagcttcgcgctgacatcatcggcgggcgactgctgccaggaatgcctttggtcgaagtagaactggtcaaagcctacaacgcatcgcgcaacacgatccgtgaagcgttgcaccgcctcgggcaagaagggttgacccgttatgtgcgcaacaagggggtgatggtccggcggttggcgcgagaggaggtgcgtgatttgtttgtcgtgcgccgcaccctagagttgcaggccatcgctcagagcggtcccctgacggaggatcaatccgaacgcatgcaaaacgccatcgacgccaccaccctggcccgcgagcgcgaagactggcgtgctgtcgccacccatagcttggtgtttcaccagcacatcgtcgggttgatgcgcagcccgttgttcgatgagttttttgcccaggtcatcgctcaactgcgcttggtgttttgcgctgcgcctgatgagcagcgttttcagtcgccgtggctggagcgtgatcgtgatatctacacattattggtcgagcaggataaatcggcggcgggggaggcgatgagcctgtacctggatgattcggaacgcctgtccctggccttgtttaaccacccctgatcgaggatctgcaccatgtacaaagactatccggccgcttatcaggtcagtaaaggttcggcgttgcaggtcgacacagcgttttacgagcgcatccgtgatcgaaaagaccagcgcacgctgatcgagcagtttgaggtgccgattcgtacgggcagggcgtggaaggtgccagccgggcatgtgttccgtgtgaccacgccggttggcccgcaggtgggtgatttcaacgtatggaatgccaatgacccccgtgagcgcctgtgggcggcgcgtacccgccaattgcagggcgcccatgtcagcacccatgaccgcttgtggtcgaatttgccattcctgcggcctttggtgacgatcacggatgacagcctggccagctacgggatcgatgagcacggcgggcggctgcatgatttgcttggcacacgttgtgatccctatgttaatcggatgctcaccggtgaggacttccatcaccattgccactccaacctgacacgtgcggttttgccccacggactgacggaattcgacgtgcatgacgtgctgaatattttccagtgcactggtctcaatcacgacgacatgtacttcatgaaggcctgccctgcacagaagggcgactacctggagttctttgccgagattgatttgctgtgcgcgctgtctacgtgccccggtggggatttgtcgctgccgatgtgggggccggaggcgcaggacccgctgacggtgtgccgtccgctgggggttgagatctacacgttggaggatgagttgctcaatggctggcgccagccggaacgtgctgcctacaaggggcagcacgggttgcatattgccaaggcggattgggagtaacccaaggctcagcgatcctgcgcatccttggcatccgcctgggcgttgcgctcggccacacgcttgcgttgttcgtcggtgagttcaactttgttggcgctgtcacgcagcatcatcagcccaccgacgatcgacccgatcgcaactaccataatcaaccacgcataccacggcataaggctctccttgaggcagattgccgtgggagagttttcccacggtaataactgctttgagtgacgggctttcttactagttcagtgtaggcccgttctgcctcgtagtagatcagagcccggtcaacatcgcatccgccggtgcatcggcacggtcttgcgcagtcatctggaagtaggcgaaccccaccaccataaagcccaggaagatcagcccgatcagcgtgttgaaccaagccatggccaccaggcacaccaccgccagcaccagtgctatgcccggcacgatggggtaacccggtgcacggaaggtgcgctccagcagcggttcggtcttgcgcagtttgaacaggctgagcatgctcatgatgtacatcacgatggcgccgaataccgccatggtgatcatcgccgcggtcagtgtcatgccacccaggttgatcaggccgtcgctgtagatcgccgcgatgccgatcacgccgccggcgatgattgcacggtggggggtctgaaaacgtgacagtttggcgaggaaagacggcaggtaaccggcgcgggccagggcgaagaactggcgcgagtagcccaggatgatgccgtggaaactggccaccaggccgaacaggccgatccacaccagcatgtgcaaccagccggagctgtcgccgaccacggttttcatggcttgtggcagtgggtcgttgatgttcgacagggtgcgccagtcacccacgccgccggcgaagaacatcacgcccatggccaggatcaccagggtcaggatgccgctgatgtaggcctttggaatggtgcgcttggggtctttggcttcttcggcggccatcgcggcgccttcgatggcgaggaagaaccagatggcgaagggaatcgcggcaaacatgccggcaatcgccggtgcgccaaaagtatcggaaccggcccagccattcagggcaaagttactgaagctgaaggcgggtgccactacgcccatgaacaccagcaattcagcgacggcgagcacgcacaccaccagttcgaaggtggcggcgagcttaacgccgaggatgttcaggcccatgaacacgatgtaggcaccgacggccgcgtgtttggggtccagcgccgggaactgcacattcagataggcgccgatggccaaggcgatggcaggcggcgcaaagacgaattcgatcaaggtcgcgagccccgcgatcaagccgcctttctctccaaaggcacgacggctgtaggcaaacggcccacccgcatgaggaatggcggtggtcagttcggtgaagctgaagatgaaacaggtgtacatcgcggcaaccatcaatgaggtcaccaggaagcccagggtcccggcgacgccccagccatagctccagccgaagtactccccggatatcaccagcccgaccgcgatgccccataagtgcagggtgcccaaggtgggtttgagttgtgtgttcatcgtgatgcgctccctgaacggtttggaatgattcaaggtgttgcagcggacatgccatgcctcacaaccgtgtcgtaaagcggcgcaactgtcgtctgggagatggtttggcgtttgaaattttccggtgtcgcaccagataagtgcgcgggtggctggcagggcctcatcgggggcaagccccctcccacacttggcctgcgtagaccggtcaacatgtgggagggggcttgcccccgatggggccctccaatccagcacaaccctccctgtaaaccccgcataaacccactctttacgccgtctttacgccccgcccacaccctcgctctcgttcctttacgccactcctgccgacaattgccccacacgcggcactcgccgctaaacggagagacttccatgagcgttctggacggggtgtcactgctattggccgtggcgctgttcatttatctgctggttgcgctgttacgcgcggatcggaactaggagctggccatgcacagttatgactattggctgatcattgccttctttgccgtggtgctggtgccggccccgttcctggggcggttctattacaaagtgatggaggggcagcgcacctggctcacaccggtgttcggccctgtggaacgcgcctgttatcgcctgtcgggcgtggatgagcatcaggaacagagctggcagaagtacatgctggcgttgctcgctttcaaccttgcgggctttttgctgttgttcgcgatcttgttgttccaggactacctcccactgaacccgcagaaattgccggggcaggaatggacgctggcgttcaacactgcagtcagtttcatgaccaacaccaactggcagtcctacagcggtgaagcgtcactgagctacctcagccagatggccggcctgaccgtgcagaacttcgtcagcgcggcgaccggtctggccgtccttgtcgctttgtgtcgtgggatcggtcgcaaatccaccaagacattgggcaacttctgggtcgacatgacccgcgccaccctctacggcttgctgccgttgtgcctggtgctggcgttgttcctggtgtggcagggcgtcccccagaccttcgcccattacgtggatgccgtgaccctgcagggtgtggatcaagtgatccccctgggcccggcggccagccagattgcgatcaagcaattgggcaccaacggcggtggcttcttcggtgtcaactcggcgcatccgtttgaagaccctaccgcttgggcaaacttgttcgaagtggcgtcaattatcctgatccccgtggcgctggtgttcaccttcggccactacgtgaaggacctgcgtcagagccgcgcaatcctcggctgcatgctggcgttgttcatcatcggcggcgcgacctcgctgtgggccgaataccagcccaacccgaccctgaacaacccggccgtggagcagactgcgccactggaaggcaaggaggcacgcttcggtaccaccggcacggtgctgtggtcggtgaccacgacagcggcgtccaacggctcggtcaacggcatgcaggacagcctgagccctctcagtggcatggtcgcgctggtcaacatgatggtcggcgaagtgatcttcggcggcgtcggcgctggcatgtacggcatgttactcaacgtgttgattgcagtgttcctcgccggcctgatgattggccgcaccccggaatacctgggcaagaagctgcaggccaaagaagtgcaattgctggtggtgaccttgctggtgatgccggtgggcgttctggtgctcggcgccattgccgccagcctgcctggcccggccggcgcgatcagcaaccctggcccccacggtttcagccagttgctctacgcctacacctcggccagtgccaacaacggctcggcgttcggtggcttcagcgccaacaccccgttccacaacctgatgctgggcctgggcatgttgatcggccgcttcggctacatcctcccggtactggccctggccggtagcctggcgatgaagaagaccgcaccgattggccagaacagcttcccgacccatggcccgctgttcgtgaccctgttgaccgtgaccattctgctggtgggcggcctgaccttcctgccgacgctggcactgggccctatcgctgaacatctgagcatgggcttctaaggggatatgaaaatgaatatgcctgcaaaaaacgcagctcctgccaaaacccaggagcctgccaaaaccgccatctccgccctgtggcgcccggcgctggtccaggcgttcgtcaagctggacccgcgccagctgcaacgctcgccggtgatgctggtggtcgagttgaccgccatcctcaccaccgtgttgtgctttgtgcccgacaccgccgtgccgacctatgtcgccgtgcagatcgccgtgtggctgtggttcaccgtgctgttcgccaacttcgccgaagccttggccgaaggacgtggcaaggcccgcgctgacagcctcaaggccggcagcgaaggcctcagcgcacggcgcaaggaggccgatggcagcttcaaggtcgtgccggccaccagcctgcgcaaaggtgatgtggtgcgtgtcgccgccggggaaatgatccccggtgacggcgaagtcatcgaaggcatcgcggcggtcaacgaagcggccattaccggtgagtcggcaccggtgatccgcgagtccggcggcgaccgttcggcggtcaccggcaacacacgcctggtgtcggactggctgctgatccgcatcaccgccaacccgggcgagtcgaccctggaccgcatgatcgccctggtggaaggggccaagcgccagaaaacccccaacgaagtggcgctggacattctgctgatcggcctgaccctgatcttcctgttggtggtggtaaccctgcagccgttcgcccatttcgccagcggcagcttgccgttggtgttcctggtcgcactgctggtgacgctgattcctacaactattggcggattgctgtcggccatcggcatcgccggtatggaccgtctggtgcgcctcaacgtgatcgccaagtccgggcgtgccgtggaagctgcgggcgacgtgcatgtgttgctgctggacaagaccggcaccatcactttcggtaaccgtcgctgtgcggcagtggtcgcggcgcctggcgtcagcggcaaggaagtggccgagggcgcgttgtttgcctccctggcggatgacacggcggaaggtaaatccatcgtcgaatacctgcgcgccttgcaccctcaagccgagccgagcgcagacgaactgacggccgtgccgttcagtgctgaaacccgcttgtccggtgtcgactaccagggccgtgtgttccgcaaaggcgcggtggattcgctgctggccttcatcggtcaacaacgtcgcgacttgcagcctgcgctgtcgcgggaaatcgacaagatcgcccagagcggcggcaccccgttgctggtgtgtgccgacggcaagttgctcggcgcgatccacctgaaggacgtggtcaagccgggcattcgcgagcgtttcgccgagctgcgcaaactggggatccgtaccgtgatggtcaccggcgacaacccgttgaccgccgccgcgattgccgccgaagccggcgtggatgacgtactggccgaagccacccccgagaaaaaactcgcccgcatccgtcatgagcaaaatgacggccgcctggtggcgatgtgcggcgacggtgccaacgacgctccggcgctggcccaggcggatgtcggcatggcgatgaacgatggtacccaggctgcgcgcgaggccgccaacatggtcgacctcgacagcgacccgaccaagctgctcgacgtggtgcagatcggcaaggaattgctggtgacccgtggcgcattgaccaccttttccatcgccaacgacgtggccaagtacttcgcgatcctgccggcgctgttcgcctcgatctacccgcaactgggcgtgctcaacgtgatgcacttgcagagcccgcagagcgcgatcctttcggccatcgtgttcaacgcgctgatcatcgtggtgctgattcccctggcgctgcgcggtgtgcgcgtccaggcggcgagtgcggcggcattgctgcggcgcaacctgctgatctacgggctgggcgggattctggtgccgttcgtgggcatcaaggcgatcgacatgctgctgactgcgttgcacctggtttgacccgattcctgtgggcgcccggcgggtgcccacaggttgcaatgaccgaattgaggaatccgaaatgtccaacatgatccgcccggccctgagcctgctggtgctcatgaccctgattaccggcgtcgcttacccactggtggtgaccggtgtcgcccaagtggctttcccggaccaggccaatggcagcctggtacgcgatgacagcggcaaggtgcgtggctccagcctgatcgcccaggattttaccggtgacaactggtttcacccgcgcccctcggctggcgcttttgcgacggtctccagcagtgccagtaaccttggtccaagcaacccggcgctggcgacgcgtatcttcgatgacgcgagtaaacagctggtgccgagccaggggccggtgcctctggtatcgctgactacctctggcagcggtcttgatccacacttgccaccacaggcgattgcctatcaactggcgcgggtggcggcggcgcggaatgtgccggtgtcgaccttgcagcgcttgctcgatgaacacatcgaaagcccgctggtgggcccgccggtggtgaatgtgctggcgctgaacatggccctggaaaagttgtaggccgtggcgcagccatcgcaggcaagccagctcccacaggggaatgcattccaaatgtgggagtgggcttgcccgcgatggcggcctgaggcgcaaccaataaacatctgaaggaaccccgagcatgagcgactccggccgcgccgatgccctgttagccgatctgccccgggacggccgtggccggctcaaagttttcctcggcgctgcgccgggcgtgggcaagacctacgccatgctccaggccgcgcacacgcagttgcgccaaggcgtgcgcctggttgccggcgtggtcgaaacccacggccgcgccgagaccgaagccttgctcagcggcctgccgcagcaaccattgctgcgcagtgaataccgtggcgtgatgctcgaagaaatggacctggacggcctgctcgccgccaagcccaagctggtgctggtggacgaactggcccacagcaacgcccccggtagccgtcacgaaaagcgctggcaagacatccaggaactgctcgccgccggcatcaacgtgtttaccacggtcaacgtccagcatctggaaagcctcaacgaccaggtgcgcggcatcaccggcgtgcaggtgcgtgaaaccctgccggactgggtgctgcaagaggccgacgaactgctgctgatcgacctgccgtcccgcgagctgttggagcgcctgcgcgacggtaaggtctatgtgccggagcaggcgcgtgcggccatcgatgcgttcttcacccagaccaacctcatggccctgcgcgagttggcgatgcagaccgccgccgcccacgtcgatgacgatttggcccaaggctatcgccagctcggccaggctgcgccggcggtgcgtgggcgtttgctggtcggcgtggatggtgatgcgcaggccgagcgcctggtgcgtcatgccagtcgcgtcgcccagcgccgccatttgccgtggagcctggtgcatatcgataacggtcgtgcgcgggacgaacagtcgcggctgcgcctgcaaaatgcccagcagttggccgagcgcctgggcggcgaggtggtattgctgcgcgcaggggaggtggccaagacactgatccagcacgccgccgaacgccgcgccagcctgctgctggtggggcagtcgcgcatgcgttggcgccgtcgcttgttcggcggcggcctggctgcgcgtttgctgcgtaatgcgcggggcttggaaatcaacgtcctcgacagtgacgacatgcctgcgccgccacgcttgccggatgtacgtgggctggtgtggttcgactatgcgctggcagttgtggcaacggtggcggcggcggcggtggcctgggccgtgtccagcgccttgccgttgccgaacatttcgttggtgttcctcgctgcggtgttgctggtggcggtgcgcagcagcctggggccgtcgctgatgtgtgcggcgctgtcgttcctgacctacgacttcctgtttatcccgccgaatttttccttcgccatccaacgtgaagaagacgtactgaccctgttgttcttcctgttgatggcggcgttgaccggcaacctggctgcgcgccagcgccgtcagttgcaggcgttgcgcgacacccaggaagaaaccagcgagctgctcgacctgtcgcgcaaactcaccgccgccactgatcgccaggcggtaatcagtgctgccgcgcatcacctggagggctggagcgacctggacctgtgccttgtcaatcgcgatggccagggcggttgggccatcgagacgggcggcccgctgaccctgactgaagctgagcgtgccgccgccgattgggcctggcaacatgaccaaccagcgggcatgggcaccggaaccctgccgttcgggcgttggtggtggtggccgttgtcgggcgaagaaggcccgttgggtttgctcggggtcagccccaaacccggcctggaattgagcgggcaacgccgtcgtctgctcactgccttgagccaaccgctggcccaggcgctggcgcgggcgcaactggcccaggagttggagtctgcacggttgcacggcgaaaccgagcaattgcgcagcgccttgctggcgtcggtatcccatgatttgcgcacgccgctgacctccatgcgtggcagcatcgacagcctgctggcgctcggtgaggccatcccgctggaggaccgccgcgagttgctcgaaggcacccgcgatgaggctgaacgtctcgaccgttacatccagaacctgctggacatgacccgcctcggtcacggcgctttgaagctggcgcgcgattgggtgtcgccgggtgatatcgtcggcagcgccctcggccgtctgcgtgcgatgctggcgccgttgcaggtgagtaccgaagtgccgcccgagttgccgttgttatatgtgcacgccgcgctgatcgagcaggcgctggtcaatgtgttggaaaacgccgcacgtttttcgccgccgcaagggcgcttgcaactgagcgccggcgttgccgataaccagttgttcttcgccgtggctgacgaaggccccggtattcccgaggatgagcgcgcaaagatcttcgatatgttctacaccgcagcacgcggtgatcgaggcgggcagggcacggggctgggcctcgcaatttgccagggcatggtcggcgctcacggtgggcatatcagcgtggccgacggcattgacgggcgtggcacctgcatcaccttgttcctgcctttaccgacacagcctggcctggagcgcgaggcatgagctaccctgttttcttcacggattttgattggaagccatgagccagaccgcgacgattttggtcattgatgacgaaccgcagatccgcaaattcctgcgtatcagcctggcctcccagggctacaaagtgattgaggccggcactggcaacgaaggcctggcccaggcagcgttgaacaaaccggacttgttggtcctcgaccttggcctgccggacatggacggccagcaggtgctacgtgaatttcgcgagtggtcgacggtgccggtgctggtgctgtcggtgcgggccagcgaggggcaaaaggtcgaggccctggatggtggtgcgaatgactatgtgaccaaacccttcggtatccaggaattcctggcccgggtgcgggcgctgctgcgtcaggcgccagcgggtgaggcccaggaagcagccttgcgttttggcccgctgacggtggacctggcctatcgccgggtgctgctggacggcgccgaagtggcgctgacgcgtaaggaatacgcagtgctggcgcaactggcgcggcatccggggcgagtgattacccagcaacagttgctcaaggatatctgggggccgacccataccgaggacagccactacctgcgcatcgtcgtggggcacctgcgtcagaagctggcggatgacccgacccagccacggtttatcgtgaccgaggcgggagtggggtatcggttattgggcggatagatagacctcaggcgcgctctgtggcgagcgggcttgttgtggcgagcccgctcgccacaacggctttagtgacacgtctgtttcagcgttgctcactttcataacggtccagcgtatcactggcaatttcccgccccagggcgatcaactccggcgctttgtagaactcgaaaaaccggcacacccgcttcggcacgttgatcagcacgtctggcgggtagcccgcgatcttgtactgcgccagcgacgtctgcatcacctcgaagctctggttgatcaggtccagcagcgaagccgggccgacgttatcgatgatgaacgacccggttgccgacttcggtgcgccgggcttttccggtgccgcggcgggttgttgggattccggctcggcagattccagccacgggttgatctccgccgcctgcgcttccaacgcctcctgctccagtttcatcagttgttcggcctgcttgcggcgaaagggcaggtgcgaaccgagtgatctcgccaggttgttgaagcggctcttgaacgcgggtgggcgttggatcaccggcaactggtagtgcttctgattggtggcgttgaggttgaccgcgatgatcaagtcacagtggctcgacaccaccggtacgatgggcagcgggttgagcaggccgccgtccaccagcatgcggttgccttgcatcactggggtgaacaggctggggatcgccgccgaggcgcgcatggcttggtgcaggcagccttcctggaaccagatttcctgctggttggtgaggtcggtggcgacggcggtgtaggggatgcgcagttcttcgatgttgatctcgccgacgatcttgcggatctgcccgaagactttctcgccgcgaatggcgcccaggcggaagctcacgtcgaccaggcgcaacacgtcgaggtagtcgaggctttcaatccagtttcgatactcgtccagcttgccggcggcgtaaatgccgcccactacggcccccattgaacagccggcgatacaggcgatatcgtagccgcgccgttcgatttcctcgatcaccccgatatgagcgtacccccgggcgccaccggagcccagcaccaacgcaacacgtttcttcatggtccatgtcctccccaaggcaggtccccacaatgcacccatgagaggccggcttcaatattcgtgggagcctgcaatatttttccagaatagcggtgttgctcgggtatgctctggtcaataggcactaccgatttcaggctaaggacaggcacttttccctgtaggcaacgtctacaacgtacgactgttttttcttttttgaggtgtcatcgatgaaagcctggatgtgtgtgcctgtgatcgtgttggccctggccggttgcgccgggaaaaccgcataccgcgacagctgcggcagccagttggacgccgcctggaaagaactggacctggctaaggctgaaggctttgccggtaccgtgagctactctaaggcactgtctttgttgacgggcgccaagacccagcaacagtttgaagcgtttgaaggctgctccaacaaggccgagaaagcgcgtttctatattcgtgagtctcgcgccgggcgttgacctgcagcgagtaggatttttcatcaggtagtgagggcaggatgtcagctttggtcgatcagttagtcgctcaggtcattggcctggaagtagggttactgagctgccaggctcgccttgccgccgtcaccgatgatgaagccctacatgacctgcgcaccaccgtgcgccgtctgcgcagcctgttgcggcccttgcgcgggttgccaggggtggagcagcttgaagtggcggccagcacggtcggccaattgaccacgccgctacgcgaccgcgaggtgctggcggcgtatttgcaccagcatggccatcatgaggccgcaaaccgacgactgtgcctgcaacccgaagcctatcgtcaggtggcgcaaagcccggaacttgcgcacttgctgctgatcctcgacgccttcccgcgtttcctccgtgcttctgaacaccagaaattgctcaaaggcctgcgaccacgcatcgaaaagcgtctggccaagcaatggcagacactcgataaggccttgaaggaaccgggccatgatcgccaccgcctgcgcttgctgatcaaacgcgtgcgctacgctgcagaagcctatcccgaattggacaagttgcccgccaaggccatgtcgcacctgaaaaaagcccagggcgcccttggggattggcatgattgctggcagtggttggcccaggctgaacaccaggcagatctgcaaccttgtgttgccgtatggcatcgcaccatggccaaggcgcaggggcaggcggaccgcgtgctggataaactcagtgctgattgtttctgaaccggtccggtttttggccggaataggcgctgtacctgattggtccgatggttaagatccctcatctgttccttttgatgtgagaccgccatgcgctttagtgatttgctcgacgccgcccgcagcaacccgctggatgtgaccatccccgctgagtgggcccagggccgtgcgacctttggcggcctggtcgccgcattgcaatacgaagccctgcgtgcccaagtgcccgcggatcgtcctttacggtcgttggcaatcacctttgttggcccggtagcgccggacgtccccgccagttatcaagtcgaagtgttgcgtgaaggcaaagctgtcagccaattgcttggccgcgtggtgcagaacggtgaagtgacgacactggtacaggccagtttcggtggggcccgtgagtcggaaattgcggtcgaaagcaaagcgcctccggtgttcaaacattgggatgagtgccaggaactgccctatatcaagggcgtcactccggagttcatgcgccatctggcgatgcgttggagtgtcggcggcttaccctttaccggtaacaaatcccgcgacatgggcggttgggtacggttgcgcggcgatgtgaaagaagaaccgctgaccgaagcgcatatccttgccctagtcgacgcctggcccccggcgttgctgccgcacctgaaaaagccggcgccgggcagcaccctgacctggaccatcgaattcatccagccattacaagacctcacgaccctcgactggtgccagtattacgtcaatatcgagcacgcccgcgacggctacggccatgccgccgccgccctgtggagcccgaccggcgcactcatcgccatcagccgccagaccgtggtggtcttcgcctgacctcaatgctggtggcgctgccgccaggcacgccaccagccaccgctcaacacaaaacgtggaaaggtcacgaactgctcgaccatcaggcgctggaccgaatctttacgatcactgaacggctcactggcctcggcctccaggctatgcccatgacgctgcaacgccaggccggccaagataccgaccacaccgacggcaaagctggccagactcaggctgaacaccccggacacaatcaacagaaacccgatgatgaacagcggcacggcaatcaggtgcaacgccaggttggtcgggtgctgatggttctgcgggtagtgacgccattgccaggcggggagattggggtgacgtttgcccatgatggtgaatcctctgtccgttgaaacaacttgaacagagtttaggtggggggggggcggggcggcgaattggggttggctatggggctcatagagggtagttttgggcatgtccccgtgatgcccaaataacgcattaatggtggtccatgtgcatcaagaacgtgaggttgttatcggctatccagactagatatccggacctctcacccagaaccgttgcaatatcttgtgcatcatggattttccaagccttgtatgcgaaatcgaacaccactaaaaccagattttctcggctaatacgattctgtatgttctgaaaaaattagggttgtgctctgtgcttttttcatccgattcgactgggtcgagtacattactttctgtcttgaaatactgctttgccagatagttaatcgaagtggtaagtttagtcgatttaattttttggcgcgtatatttaaagtttcgaatgaaaggtctatctttttttcgagataatacatcagatagcgccgcctaggggtattcttggggggttgtatattggttttgagttatttgaaataatagtcgtctggatcgttgatgtaaacagttggtccgctaagtgaaatgaattttgcgttgaactctatggatgcattgtcgctggtagcttcaaaagtaaagtagtccatttttttattgattgttacggtaaataactcatgtgctgggatgttaaagactttcaggttttcaatgtcgttgcaggttatcccaagtctgcacatgttataccctttgtttttccatttttctggcagtttgtctggaaattcggggatgtcgaatcctatcccaacacaaggttgatcattttctacccttaatgagaaaagggctatttttccaatttcaacaggaaggctgaaaattttactgaggagtatactgccctctaactcgttccagtatttcattttttatttcctgaatggatagtgtttttttgcgccttcaatataaccttttcggggtttttcgattggtcgcaaattaaagtgcgctgaatggtctccaataccgtctacgcttccgtatttatggcctgctgagtggtcttggataaggattttcgagccgtttgctcttgtgaattgatagacttttgtgtttatgggtttgccgttttcatccaaaattgttttcctattcttgtctgtcattttttcagccgtgtattgttttgcctttcctgtgtctgggtctattaccatgtctggagtctgaaccatcggtatcccagcatctcttttcgcttgtctgaaggcgcctcggcgagaaacatcaggtgtttccggttcattctgtgttttacaggctggctgttgtatccctttcggcggacaattggcgctcagccctgtcgcatccacccagccagtagggttgggcacgtacaggtacgtgttaattccacccgccaacttcaccggatccggcgtcaggtaccgacccacatccggattgtagtagcgatgacggttgtagtgcagcccgctttcctgatcgaaatactgaccctggaaacgcagcgggttgtcgacttttctgatgtcgaggcgggtgatttccccgtaggcgcggtaatgcgcggaccagacgatttcgccatccggggcggtgagttcctgtggggtgccgaggtggtcgagttggtagtggtaggccttggtttccttggggccgaagccttccagcagcgccagcggacggaagctgtccggttcatagagatagctgcggtgccgatccgcgtggtgttcggcgatgagtttgtcgccttgccagaagaactcagtggttacaccgtcgacggttttactgatacgccgcccaaacgggtcgtagcggtagctggcggtctggccgttgggttttttaataccgatcagacggtgctggcagtcgtagcggtattcggtgacgagtacgtggcctttgccgcggcgttcgcgaatcaggttgccgaaggcgtcgtagtcatagtggtggtcgccctgaatcatcaggcggttgccggcgacgatgtccgggccggggcggttgtgcatcagcaggttgccggccgggtcgtggccgaagcgctcctgttcgtcttgggagtggtcggcgcgggtgaggcggttgagtgggtcgtagtggtagcggtgttcgcctttgcgggtgtcgagcaggcgggtgaggttgccggatttgtcgtagtcgtagtggcgtctgtacaccgggccttcggcgtcattgatgctctggttgaacaggcgtccctggtggtcgtgttgatagcggctgagcagttggccttgttggcgttgctgttcgcggccggccttgaacaggtgtgaggtgagtaccgcgccgttcagttcgacggtggcgaggtggccgcctttgtcgtgagtgaaggtgaggcggttgttgtccggcaggcgcaggttttgcaattggccgcaggcgtcgtagccgtagcgcagggtgccccagccttggtgttcggtggtgaggcggttttggctgtcgtactcgtaggccagggaccagtggccgtcttcgacgcttaggagattgccctggcggtcgtaggcgtaatcgacggtattgccatcgggcagggtttttctgacgaggcgtccggcgtaatcgcgctggtagcgggtaaccaactgactgccgtcatcgccgtgttcggtcttttccgaaaggttgccattaaggtcgtaaacgtaagcggtgcgctggccgtcaaacccggtttcctgctggatcaggccgttgttgtggtactggagccggtaggtctcgccaacttcgttttcgatttcggtcagcagtaaccgcgcgttgtcgtagcggtagttgacctggctgccatcggcattgatacggcggctgatcaggtgcaggccgtcggcgtattcgtagcgggtgacgtgcccgagttcatcgcgctcggcggtgatttttccgtaggggttgtagttgtattccctgaacccgtcgcctggcagcacaacacgaatcaaccgacccacgccgtcccactgatactgggtcagcgcgccatgttcatcctcacgcgcaatctgtcgtcccagatcgtcatagcgataacgcttgatcccaccattgggcaactgctcctcaagcaactgcccacgctcattccataccagccgctgacagctgtgatccggataccaaaccccaaccaactgtccgtatttgttgtaggtgtaatcggtaacgtgaccgtcaggatcgatcttgcgaatgacatcgccctggtcattgcgctcatacttccaaaccgctttaccacgccgcacaacccgtacgaacccgttgtcatgctcgtaggtcgtcggctcatcgtcccccggaaacaccgccaccaagcgcccggcttcgtcgtactgatacgcggtgatcgcccccagcggatcctgctcaacggtcagccggccttggtcatcgtaggatttgaaatgctcggccccgtcaggatcaacccgctgcaccagccgcgcccgctggtcatgtacgtagacttcctggctgccatcggcgttaaacaccgtgacctggccgttgtcatcccaggcatagcgcgtgtccatctgcgagaaactcgcccaatgccgcacacaccgcgccgtcttgccagaccgttcccattcccagaaaaagctcgccccaccggccaagccacgctcaagaatgacgtgctgttcgtcgtaccgataaacttcgctttcgccgacggcattggtcgctgaaaccagtcgtccaagctcgtcataggcgtaggaaacaaccgtctgctccgtcacccaaacaaacggcccctcatccacaacgcgatgaatctggtaatccaccgccacgatgcggcccgacgcataacgcaaaaacagcgagcgcccgacaccgttatccacccgctcaacacgccccagaaaatcccgggaaatacgcaggcggttgtcatacgcatcgctgatcgttgtcagcacaccgtcgcggaagtggtagaaacgtgatgcctgcgccagcaccagttcatcaggcaacgaccctaggtagatcgccgcttcggccaagctattggtgatcgcaggccgagaaaccgtgggcaagggcagggtggtcgaccgattctcatgatcggtccaaaccaccgaatccccggaaacactcaaccgatgcgccagcgagtgactccagccaaaccccaacccaccatccacttccaccgcactggtgcggtacaagcgagtccactcaaacggcaagatcccgtccagcgtcccatcggtgagggtcagcaactcctcgccggtgaccatcgacaccgggcagccgttggtggcggtcttgtcggaaggcgctgatgcatccccagccggattcttcgcaacagctggcacgtcatccacatgctcttgctgaaccaacacagttcgccgggacttgctgcgcaccgcaggcaccgcgttggcaaccacctgatccccagccttcaacggtgcatccggaactaccctgatcggcgtcgcggagctacccagcaacaccggcctggccgcctcgacatgcgcgtccaaccgaggcccgaccagttgatccgccagcatttgcagccatctacgcacgcgtccggacttgatgtgccccagcacctgcatacccaaacgaagctgaacccccatgccccgcgtggcccagatcagaaacagattgatcagtacctcgccggttatctcgcccagcagctcgtacatctgcggcggtggcagcatgcgtatccaggcaaccatggccgacaggtagataaacaacagcggctcatcgctgagcacaagcaggccctgggcaatggcgtccttgcccagtttcagcagttcatccaattcggcctgggagacgtattgcagcaacttcaggctgttactcttgaggtccgccagcaggtcgtacagttgtgtgaaattgtcccaaaggttgtagaacgccttgccgatcccggttgagagcgccaggccttgcattgcactgcgctcgaatggcgtggcgttggcaaagtcgtcccattgcggcttgaaggtctttttccattcatcacgcaggcccctttccagccccgcgatcaccgacagataagacgcatacagcgctttgatgtgatcattcgaaacgttgggataaaaggtgatctgatcgcgggcgcagtcgctgactgcaagaatgccgctggggccgatggtgcgatgaatcgacgggcccaccgggctgccatcaggggcgaccggttgcagcatcaccggcgtattgccgataggcacaaaccgcgtgctctcgaacatatgcaccagggtcaacgagccctgggccttgcaggtggcgaccgtgcgattcggtttcttggaggacgccggagcggcgagggaaacctcgtccccgaccttgaacacctgctcgacttccaatgccgaaccgctccagaagctttcggcccactcgtcaaaggtgttcaggcattcacgcaagtcacgcaggacgccttcaacgtccggcgccttggcatccatgggcgcgaggatgaaacgtgcaataacgggaatcatgaggcggccccgttgagtggggcacggctagagaggtgcatcggcggtccctcgcgctgattgatcaggcgagagactttggagaggttgccagggaaaagaagtcggcgttattcgccgagagggttaggacgtttcgccaaaacctcgggcaaaccgaggctttgttgtaggcagaggattacgggttgagcagtcctacagcttcaactgcccaatcgccttgctcagctccccggccagcgtggccagttcattgctggttgtcgccgagtccacggtttgctgcacggtgttctcggtcacatcccgaatgctcaccaccgcacggttcatctcttcggcgacgtggctttgctgctcggcagcgacggcgatctgggtgttgctttcacgcatctgcgccacggcgctggtgatttcggcgagggcggcaccggcttcctgggcttgttgcacgcagtcgtcagccttgaacgagctttcctgcatgaaatccactgcgtcacgggtgccggcttgcagcgccgagaccatgcgggtgatttcgtcggtagagctttgtacgcgtttggccaggttgcgcacttcgtcggcaaccacggcgaacccccggcccatttccccggcgcgcgcggcctcgatggcagcgttgagggcgagcaggttggtttgttcggcgatgctgtggatcacgctgaccacgccgttgattttctgactgtcctcggcgagcttctggatcatctcggcggtctgttgaacgcccgtggagaggccggcaatcgagcgttgtacgcgggtgaccacttcctggccgctgcccgccagggtgtcggcggtctgggacaggtcgcgggtggcgcccgcgtgctgggcgatgtggtagacggtggcggtcatttcgttgatggcagtggcggcctggtcggtttcgctctgctggccgagcatgccgtgctgcacatcgttcatgctgctggccaaccgtgcggcgccatcgtcgagttgctgggcggtgcgtgccacggtgttgaccacacgctggtagccggcttgcatggcgttgaacgcgctggccatctggccgacttcatccttgcaggccaacggcacgcgggccgacaggtcgccggttttctctacgtgcagcatcacgtctttcaaggtgttgagttggctgagcaggaagcggatcagcagttgcgaggcgccgagcatcgccagcatcaggatcaggactgccaccgcatagttggcaaagcgttcttcgaacacttggctcaggcttggcgcgtaggcgagcacggcgacgtattgaccgtcagggcgggcgatgacttcagcacccatcagcgggttctcaccgaacaacggcatatgattgagttcgacccagcccaggttgctgcccaggggcgacagatcctgctccgccagttgtgggacctggccgcgcttgaacgtcagccagtgctcgcccttgggcaaagcttcgccagtcggccacgcattgaacaaatgtgcctgcgcctgggccgaagccctggatgcatcgctgcgggactgttgctcaagctgcacggcatacagcaccagcagcagggtggtaatgaaggcgaccgcattgacggcccagaatttgtacttcagcgagatattgctaagccaggcacccatggaaggttttctctgatagcggaaacagcattggcaaggtgccattattgtgccgctatccaggaaaacggttttgacatgggtcaatgcgccgcatcaatccattgctggcaagccaaaaaagctgcgggcgcaggccgtgctgtgacgggccaggtcttccaagctctcgttgcggtgcagggcgacttcgcgcagcacttcaggtagatacgcgggctcgttgcgaccgtttttcggttttgggcgcaaggtgcgtggcagcaggtagggtgcgtcgctttccagcatcagacggccacggggaatttccctgaccagggggtgcaggtgtgtcccacggcgttcatcgcagatccagccggtgatgccgatgtgcaagtcgaggtcgaggtagctgaacagcgcctgttgttcgccggtgaagcagtgcaccacagcggcggtgagctggtcgcggtagtccttgaggatgtccagcaggcgctggttggcgtcacgttcgtggaggaataccggcaatttgagctcgacggccagggccagatgttcttcgaggactttttcctgctgcgggcgcggtgaaaaatcccggttgaaatccagcccgcattctcctactgcgcgtactcggttttctttcagcaaaccgcgcaaacgcgatgcgctatcgccgttccagtcaatggccgagtgggggtggatgcccgcggtgctgaacaggcgctggccgctttcatcgagtttttcgcactgcgccagggcctgttcgctgccctcgatgctggtcccggtgagcaccaattgttgcacgccggcagcataggcacgttcaagcacggcctggtgcttctcgtcgaaactggggttggtcaggttgacgccgatatcaatgagttgcatggtgctatctccgcctgcggccggaaagcatatcagagctgtagatttataagaaaaacgaagaactacaacgagttatagctgtctttgaacgtcgcaagcgacattgtggttggcccgccgcctgccaccatgccgccgttgcgtaccttgccagcgcataaagcgctctgtttctgacccccaccgcctcgtttttcgcgagggcgttggccagtattctttccggagagcggatgatccgaccctcggcgttgcttatgttgtgcctgacgatgctgctgcccatggcggcggttgcacgtctggacgggccgctggaagtgaccaggcccggcaaggtccgcgatttggcggagattcgttcaagccgcacgttgcgcgtcttggtcaaccagagccgtaacagttccggtgaggtacaaggccaggccatcggtgtcgaataccatcgcctgcgcgccttcgagcagtacctcaatggccatgcccgtgatggccaggaaatcaacctgaagatcattcccaaggccaaggaccagttgctcggcgcgctggcccgtggcgaaggcgatttggtggcgcccggtgaactgctcgatgtaaaggcggtgcacaagatcagcaccagcgacccgattgccagcgatgtgccgttgtggctggtgggggtgaagggcgagcgacggtttaccaagctggagcaactgtccggccgtaccctggcactgaccaccggcagtgcggcggcggatgccatcagccaggtcaaccagaagctcgccctgcacaagcagccgccggtcaaagtagagtgggtcgacccaacgctggctgtggaagatgtactggagatggttcaggccggtattttccacctgaccattgtcgaaaagccgattgccgagcgctggtcgaagatcctgcccaagttgcgtttcgataagcaggtggcgatcagcgagccgggcgacgaatactggttcgtgcgccaggatgcctcgatgctgcgggccagcattgaccgattcctcaagacctatcgaaccccgtccgaccaggatgtggcgttccagcgtatctaccgtcgcctttatcaagtgcgcaacccattggcccgcgtcgaccgacagcgcctggaaaaactacgcccggtcttgcagaaacacgcccgcgagcagggtatggactggttgaacctcgccgcactggccttcaaggaatcggcgcttgaccctggcgcgcgcaacagtggcggccccaccggcctgatgcagatcacgccatcggcggcgcaacgcgtgggggtcaacaatatcgaaagtctcgacagcaacgtgcaggccggcgcgcggtacctggcaatgatccgtcgcaagttcttcgccagccccaagctcaacgagcgcgagcgcatggcctttgtgctggcggcttacaacatggggccggagcgggtccagggcatgcgtactgaagccaagcggcggggactcaaccccaaccagtggttcttccaggttgaacgcattgccatggagcaagtagggatgggcggcgtcagctatgttaatagcgtcaacaagtacttcttggcgttcgatcgggagcgagcgtcccttgaaccgcaggcaccgaaaatcgcctcacgaaagtaatcgattttatcgatattaatcaggcattttttcggcttttatcattgtctaaactgattaatatagcggccaaccaacccctactttgaaaaggatttgcaccatgagcccactgatcaaaagcattctgtccacccgcgccggttacggcctgactatcctgcgcattgtggttggcatcatcttcgccgcccacggatcgcaaaaactctttggctggttcggcggctatggcctggcgggcactgcccagtggatggaaagcattggtctggcaccgggtacgttgatggcgctgctgtcgggcggtaccgagttctttgccggcctggcgctgatcattggcctgctggttcgcccggcagcattgggcctgaccatcctgtcgctggtggcgatcttctcggtgcacatccataacggcctgttcatggccaacaacggttatgagttcgcactggccttgctcggtggctccctggcggtactactggaaggtgctggcaaactgtccgcagaccgcgccatcgcccactgattgtgctgcaacaccttgaatcggcccgccctgtgcgggccttttcgttgctccggattcttgacaccgccccaccggcttctctaggatgccgttcatgcgccgatttaaacagctaattgcggggcgccatgggtgatcgttatcggtcccgacaggagcgtatttcatgcttcgaaattccgctaaagcgctggttcggtgttgcctctcacctgcccgcagacttttgaggcagagacacgacacgatgaatgcactacgccccctgatacgcctggccccgatcaccgcggaccttactcaacgcaacccgaaaattcttcttggcggcaagcaccagccgacgctattgcgttacctggacggttggccgcgtcgcactggccgaccgtcagcgttcctgatccagtttgttgaagatggcgattcacttgcgcgttttgccagcaacagctttgaccttgcggttatccaggcaccaagcgccaacaatgccaccgaggtcatccgccaattaacccgtattgcacgacaggggctgatagcccgtcgctgaaccttcagtgaatcgtgccgccggcttgcaaccggcgtcggcgctctccaagaaagaccatccaggcgatcaggcataacgtcagcggcatggcaaagatcgccaccagcgttatcgccaactccagatgacgcacttgggcgtaggcttcgcgctgcagggtatgcagctccatgggtaggcgcagacgttccttgttgagtgcttgcagctgggtattggtctccaccgcctgggtgccgagggtggttgtccatgggctcagccgttgccattcctgctctgttcgttgcaagcgtcgctccagttcgctggctttcgaacgataggcctgtcttgcgacctcacgcataccctccagcaccgtcggcggcctttcctgcgttgccctggggcgaatcgcgacgagcatgtcgggggcggacaggttatccagtgtattcagaacaaacagcgcgttgccatcgggcgctgcgtcgctgaccttatcggtaagcatgtccgtatcagcgatgaccacaacatgaatctgcgccgctgtctgcaacccggacggcaggcccttgataccatcgggaaaaactgaatagctcggcccttcgatgcgtgcagcaatgacatggcgctgctcccggctcgaagcctcttcaatcaaggaattgggtgtggttgcgcgagtggattggttggcatccaacagcaccgattgctcggaactttgcaggatcggggtgaaggttgtgcggcttttgttcaactgcgcgagcgtcccactgctcgatacggtcaccctgttgaggttccaggtgctgatgtcgttcaggttcatcgcctgtcgtggcaagttcagcctgactcgattgggcatatcaggcgtctcccagggcgtgtagagagcgtcgaccaccagcttgtccgtcggcatctggataccccaggcggcaagcacctcgtccagtcggctattggctgggagtgggtttgagcgttgttcgctcaaagggtcgatgaacatcatcaatctaccgcccctcaagacaaattgctcaatcccatacaaggtacgttccggcaacatccgtggctgtacaaccatcagggttttgatgtgttcggggatttgagcggcattcggctccagagcgaacagttcgaattctcgccgcaccgcctgcaagagccgacctgcggattcgtccatcgccagccccgacagcagcccaacaaccggtcgctccgggtgctgcaacttgtagagcaggtggcttatttcatattcgagcaacggctcgcgctcgaggctgaaagaaccgatacggcgcacgccatgaccggggctcgtgctgatgagcccgagaaaccctgtgttttcgtcgagccctgacagccttgctttataggcgtcttccgaatagggagcgggttcaatcacgtgcaggttgatcatgccctgagccttcttttcgtactccttgagcagatcctcaatacgtttgccatagcgtttcacggcgtagcttcgtttcgggtcgttatttgaattgaagtaatacacgtccaccgggctttccagcgttgcaagtagtgggtagacggggggcgataaagtgtggattttttgttgagaaagatcccaccgtatatcaggaagtttacctatccacaccaggttgaaagccaggaaaagcaaaaaggtgacgcatagcgtcataccggtgcgcagagtggaccgcattaagggtttcccttctcatctgtgtttgtagttgagcgtgactgtcgttgcggtgagaaaggtgaggatcatgctgataaaataaagtgtgtcgcgcagtgtgagttttccatcatcgatactgctgaatcgccaagtagggctgagggatgccaggctgtcgatcagccatataggggtttggtgttcaagtgagtccaatacataagaaaggccactggctgtcagtaacaagctcagcgtcaatacgaaaatgacagtgcgctgatgcaccagtgcgcaaataaaacagcctgcggataagtaactgcctgccagcagccaactcgccaaaaattgcgaggcaatgacaccgttgtcggccttgcccagatagttcgcaatgatcaccagagggaacattagaaacaggccggtgctggccaccagccaggcggcgaggaattttccgacaatccattcgaacgttgtgatgggcagggttttcatcaggctgaaaaaacctgcgttggtttcatcggaccagagttgagtggtcagggcggggatcagcaataagtacagcgaagggtggaaccggaaaaatacctgtaagtcactgccgttttgttcctgccacggacttacgtacaaccctaatgtcactgagagtatcaggaagatggcaatgttgaggtaagtgccgggggagcgcgcatagctggtgagttgacgcctcagaatgatgggcaatagtctcaatgggacgcctctttggtcagatggtggaccacatcattcaggcgacctggctccaggttcagtgagttgattttccagcgccggctggcaatcagcgtgttgatatggggatagatggtgtgtccgggcatggcgagaaccgtcactgtgccgggcgcgtttcgatgctcttcaatgcctgccacacctggcaggacagccagtgccaacaggtccagtggcgtctcggcagtaagggtgactgcctggaagtgacgcgagtcgcgctgtagatcgggcagtggcgtatcggccaccaggcgaccgttggcaatgaccagggcacgtgtgcacagttcggacaactcttcgcagtgacgcgaggcaatgatgaccgtcatttcttgcgttaacgattggataagcgccttgaatgcgtgcttctgatcctgcgcgagtccttcggtgggctcgtccagcagtaacagggcagggccatgcaggatggcctgggcaattgcgactttgcgtttccaggcgatggaaaggaggtcgaggggggcatcgagtaccgggaacaactccagtcgtgcgacggactgttccaggcggtcacgtttttcggtaccgcgaaagccacgaatggcagcaatgaaatcgaggaacgctttgacggacatcgtcggatgaccgaggtcgttggacagttgatagccgaccagttgccttgcttcgagcgggtgggtttgtgtgtcgaagccgtgaatttttatatgaccgctggacggctgtgtcgaaccggcaatgacatcgagcagtactgttttggccgtgtgatcttgtccgaacaacccgaggcatgcttgttgaccggcactgaatgaaaagtcgcggacaatcgtattgttacccatgtgttttgtcagattgcttacttcgatcattgttttaccgaataagtttggtatgacgtagggaagctgaaaaaagggtacgggttactctcgcttttgggaacgtcggtcagcattaataagagaagtcctacgtgcagggcgggcagaccactgaaacaatgtgtcgtgtcttggagtgtctaatttttgaatgtttatttgttttttatataaactttctttccaaataatgaggcctgattgcatgatgctgctacgtacccttgttcttgagcgaaatggtcaagatgctccggttaacggtgctctgctctgtgggtttgctgtcggtcagacggcctcaaactttcttgtttacagcctggatgaagagatagaacctggaagttccagggtctatattgcggccttgcgtaaaaaacttgaccggtattttctgggaggcgtcgaatccaaggaagacctgcaggtggcattgcatgttttcaagcaaatactgacattagccgcttcgggcgttaaacccggtggtgttaccgaaacccaggtgccttatcattttgtcgatttaaaaggttgcaagttgccacctgccaggcctgaggatcatcactcggtgatcatcaaaaaagcgctggtgatgaaagtgatcaccctgggcatgtctgcgccgacgttgccggctatcgaaagtgcttcagtgatcgtgccgtccattcgtttttcgtcacagatgatttcccctcccagggtggcgagcccctccgagtcgctccgcttaccgtcgcatgagcaaccgcttgaggagccccgacaggtgccctcgggcgcgccggtggacatagcacaggcctcacctgctatctcgcgcgaacccgatgcgccggtgccaacgaaacccgcgccttcagataatcacggtacattgttcgaagtagacagcacgctgaccaaccttgcccgtgtcgctcaagaattgacgcagcaaaaactcgctgcaatcgagcgggagactgcacttgagcagtggcaggcgcgactgcagcaggaacaaaaccaactggatgaaaaggttcgagagctggagcagcgcaccactcaactgcatgatcagtcgcttgcagtcagccagaggaccgaagccttgaaggtgatgacgtcacaagtctcgggcttgcggcagagtttgcgcggcctgttgctggagctggatcgcacgctggacaactagaccggcctggctactttcaccggttcatttatcatcaacgccagccagccgaacccagggcatgaaaccctggcgtatcggcacctatggacattgcctggggatgcaagcgtttgagtaccaagctgattaccaaagaaggccatgaagcgctgaaaaaggagctggattacctgtggcgcgaaaagcgcccggacaccacgcgcaaagtgacgtgggcggcttcgctgggggatcgcagcgaaaacgccgactaccagtacaacaagaaattgttgcgtgagatcgaccgtcgcgtgcgctacctgcgcaaacgcctggaagatatgcgcgtggtggagtacatgcccgagcaagagggcaaggtgtttttcggcgcctgggtggatatcgaaaatgagcagggtgaaaccaagcgttttcgtattgtcggctatgacgagatttatgaccggatggactacatatccatcgattcgcccatggcccgtgcgctgttgcgcaaggaggtggatgacgaggctatcgtgcagacgccaagcggtgacgtgtgctggtggatcaccgggatcgaatatgtgaagtgagcaaaatgggcccgtattctgtaaggaatgcgggcccatcgcgtttcaaccttcgcgcaacaccgtcagcgggctggcattcagcgcgcggcgggtgccgaacacaccggcaccgccgatcagcacggcaccgatcaccgggagcagcaacagccacgggtgagggtgccaggccaggtcaaatgcgtagcggtacagcacgaacgtcaccagctccgtgcccagcgcggccagcaacccactgacggcacccagcaaaccgaactcgatacgcctggccttgaccagcagcttgcgttcggcgcccagtgcgcgcaacagcgcgccctggcggatacgttcgtccagggtggcttgcaggccggagaacaacaccgtcatccccgccgccagcacaaacagcagtacatactccactgcgagggtcacttgggcgaggatgctgcgcaactgctccagcagcgcctcgacctgcaggatggtcaccgccgggaacgcgcgtgacaggtcgacgatctgctggtcatgcccgggtgccagatagaagctggtcaggtaggtggccggcaggtccttcaaggtatccggttggaaaatcatgaagaagttgggctggaagttatcccagttgatcgtgcgcaggctggtgacccgcgcttctcgattctctccgcccacggtgaataccaagtggtcgtcgagcttgagcttgaggctctccgctaccttggcttctaccgagacacccgggatttcatcggtaggttgcgacgaccaccacgagcccgccgtcagggcgttgcctggtggcaggtcggcggcccaggtcaggctcaggtcgcgttgcaccgcacggtcgccgctggagtccttgctgacgatttcctgtaccggttcgccattgatactgatcaggcgccccggcaccaccgggtacagtggtgcggattgcgcctgcagttccagcagacgggtgccaaaggcatccttgtcggccggcaggatgttcaaggcgaaatagttcggtgcatccttgggcagctggttttgccaggtgtcgagcagctcgccgcgcaacagtgcgatcaaacccatggacagcaggatcaagccaaacgccagggattggccggccgccgccagtgggtggcgcagcaactggcccaggcctaggcgccaaggcagggaggcacgggccagcaggcggcgcaggctttgcagcaacagcaggagcaaaccaccgagtaccagcgcagccaccacgccgccaccgagcagggcgaaggtcagcaccaggtcgaggctcaggcgccacatgatcaggcccaaggcgaacagtgccgcgccgtagaccatccaggtgctggaagggatcggcagcaggtcacggcgcaacacccgcagcggtggcactcgacccaatgcggccaacggcggcagggcgaaaccggcgagggcgaccaacccggtgccgatcccggcaaccgccggtagcagcccgccgggtggaacgtctgcgggcaacaggtcgtggagaaagtagaacaggccaaactgcgccagccagcccagcagggcgccgaccaggctggcgaaaagccccaggacgctcagttgcaggctgaacagcaacatagcttcacgtcgtgacaagcccaggcagcgcagcaatgcactggcgtcgaaacgtcgagtggcgaagcgattggccgacaacgccaccgccacacccgccagcaacacggcgaccaggctggccatgttcaggtagcgttctgccttacccagggcgccgccgatttgctggttgccgtcccgtgaatcctgcaggcgctggttggcggcgagccccggcttgatcaggtcacgataggtctgcaacacggtgctgccctgcggcccgcgccatagttcgcggtagctgacgcggctgccgggctgcaccacaccggtggcgtccaggtccgccaggttgatcatcaccctgggcgtgaggctgtagaagttgccggcgcggtccggctcataggtgagcacgcgggccaggcgcagggtcttcatgcccacatcgatgctgtcgccgaccttgaggtccagcgccgtcagcagccgcgcttccacccaggcttcaccgggtttcgggccaccccctggggtttcatcggcaaaaggcgcggctgcgcttttcagttcaccgcgcaatgggtactgctcgttgaccgccttgatgctggaaagctggatgccattatcggtggcgatgacgctggagaactccacgacgcgggcgtgatccaggccaagttcggtgccggaccggatctgctcggggcgggctggcgagctgccttcaagcaccaggtcggcgccgaggaattcggtggcgcgcaacaacatcgcaccgttgaggcgcgcgccgaagtaaccgatggcggtgctggcggcgactgccaccaacagggcgaagaacaacacgcgcaattcaccggcgcgggcatcgcgcattaattggcgcatggccaggctgaacaggcgcaacagcggcaaacgtgccatcaaggctccaggggcgcgaccatcaggccggcttcaaggcggatcaggcgtcggcaacgatgggccaggcgctcgtcgtgggtgaccagcaccagggtcgtgccgctctccttgttgagttcgaacagcaggtcgctgatgcgctcgccggtgtggctgtcgaggttgccggtgggttcatcggcaaacagcacgtccggttcggcggcaaaggcgcgggcaatcgctacccgttgctgttcgccaccggagagttggcgtggcgaatgggtcaggcgttggcccaggcctacgcgctccagcaggtgcctggcacgctcgcgggcgtctttgcggccgtccagctccagcggcagcatgacgttttccagggcgttgaggctgtcgagcaattggaaggattggaatacaaaacccacatgctcggcacggatgcgcgcgcgctggtcttcatcgagggtactgagggcttgcccggcgagggtgacttcgccgctgctgggcaggtcgaggccggccagcaggccgaggagggtggatttgccggaaccggagctgccgacgatagccaggctatcgcccttgttcagttccaggctcagttcgtgcaggatagtcagttcaccttccgcgctgggaaccactttgctaaggttccgcgcggtgagaatgcttgcgcccatggagaatccgatgcgaatgtggtttttgagtgctggcctggccttgatgtgcatggcccagaacgcagcggcgggtacagtcctgatcgttggcgatagtatcagtgccggtttcggcctggataccagcaaagggtgggtggccctgctgcagcaacggctcaagcaggaaggtttcgacgataaagtagtcaatgcctccatcagtggcgacaccagtgccggaggcctggcgcggctgccggcggcgcttgcagagcacaagccggatgtggtggtcattgagttggggggcaatgatggcctgcgcgggcaaccgcctgcgcaattgcaacaaaatcttgcatcgatgattgaccagtccaaggccggtggcgccaaggtgttgttgttggggatgcagttgccgcccaattatggcccgcgatacaccaccgcatttgccgaagtctatggcgagctggccaagcaaaaaaatgtcccgctggtgccgtttttcctcgatggcgtgggcggtcacccggagctgatgcaggctgatcaacttcacccggcggtcggcgcccagggcaagttgctggaaaatgtctggccgacgctaaaaccgctgctatgacgcttttctaccggcaggctttcggctaaggtggcgcccccccgatttggagcccctgatgtcgcgtcctgcctggtccctgtttaactaccaactgatcgagccggacgagcagctggatctgttcgcctgccaggaagtgcgggtgcatctggtggcgcgtcaactggaactgggcggctctatcgatcgcacgctgtgcggcaccctattgccggcgcaaccgcgttggtcgcgggtcgatcgttcgattttccaggaccagcgcctgtgcccgctgtgccgtgccatcctggagtcgcagaagcgcggcacgccgccgatctggccggagctgcgtttcgagttgtagggggcagctagaagcgcgcttcacgtatacaatcgatgtttacctacccgtcgtctgcgaaggatttaccggatgttgtcgcgcctttccgtcgtcacctgctgcctgtctctcgctgcgctttgtgcggccggttctgcgtcagctttgcagttgcctttgcccccaccgggtgaagacatcgtcggccaggtccaggtgatcaaggccaagtacgaagacacctttgccgacctgggcaccacctatgacctgggctactcggagatggtcgcggccaacccgggcgtggatgcctggttgccgggcgcgggcaccgagatcgtattgccgacgcgtttcatcctgccgccggggcctcgcgaaggcatcgtgatcaacctggcggaataccggctctattactaccccaagggtcagaacgtggtctacacgttcccgttggggattggtcgtgaaggctggggttcacccatcgcccataccagcatcattgccaagacgccaaaccctacctggaccccgcccgcctcgatcaaggccgagcacgccgccaatggtgacccgctgcccaacgtggtgccggccggcccggacaacccactgggtccgttcaagttcaccctgggcacgccgggttatctgatccacggttccaacatgaagtttggtatcggcacgcgtacaagccacggctgcttccgcatgttcaacaacaatgtgctggagatggccggcatggtgccggtggggacatcggtgcgtatcatcaacgatgcctacaagttcggcagcagcggcggcaaggtgtaccttgaagcgcatacgccgttgaatgatgacggtacgccgtcggtggtcgacaagcacaccgcggtgatcaacgccttgctcaagcgtgaagacctggcgaacaatttgcgggtcaactgggaccaggtgcgtgacgtggtcgcggcggaagatggtttgccgacggaaatcggtgtgcccggcgcagcgtcggttgccgccagcgcgccgatcgatctgcagcaataaggcgcgacatcaaacgcccgccaaggccttgcgccagggcgggctttttattgcgcgtgattcaggcacaaatcccaggcaataaaaaagccgacccataaatggatcggcttgataacaaccccgagggattattacttgcggctagctttttcaagcatgcgcagagcgcgctcgttagcttcgtcagcagtctgttgtgctttttgagcagcagccagagcttcatcagctttacggtaggcttcgtctgcacgggcctgggagcgagctgctgcgtcttcagttgcagtcagacgagcttcggtttctttggagacgctgctgcaaccggtagccagaactgcggccagagccagagcagagaatttcagaacgttgttcatcgtgttccccttcaaggactttctattagatggctagtatctcagagtgagccaatagccggcgtacatactacccattacttgtagtaagtaaactgacgtagcgcaagaagcaaaaaaaattctcgtgccgaatctattttggctaatcttttggagttttgtataaaaactgtccaatttttttaaccaggcgtaaatcggatccaggctgaaagggccggcccgcatgtgttaagccctgtaaacagatgaaattttatatatccacgccgacacttacgttcagcatggcttcgcgttgcccggtatcttttgcgcatgtagaggtgactttaagagcgcctgttcgtctcaaggttcaactgccggcaatgttcaggcgttcgatcatcggtagatcgaagccctttctatatccacccgtggcaggggatgacgagtgcgccttgagcaattgcaggattggtgcctactattccctacgtgcaggtgtgagcgctcagggttttctcgttgtcgaaaccggcacggggtggcgtagatgttccttcgccggaaaaacatcggtaaggtaggggtcagaatccaagacccgcgaggagtagtgatgagcgaggcgttgtccatccaccatgaccaggctggtcatcagttcgagaccaatgtggacggtcatcgtgcctatctgacctatatggatctcggcaaacagaccctggatatctatcggaccttcgtgcccaacgcactgcggggccgtggtattgcggcggcactgaccgaggaagccttgaagtttgccgaggaggcgggctacacggtgatcccgtcctgctcctatgtcgaacgctacatggagcgccaccagcgccatgccgcgaagttgtaaggcacaaatagcagcatgaaaaacgccgggctcagcccggcgtttttgtgtgcgctctataacagactcaggtgcgcttgcgcttaggcagcacgtccttgagcttggcgtgcatgctgcgcagtgtattttcggtggcggcccagtcgatgcaggcatcggtgatcgacacgccgtactgcaagtcggccaggtcttttggaatcgcctggcaaccccagttcaggtggctctcgaccatcagcccgatgatcgactggttgccttcgagaatctggttggcgacgttttccatcaccagtggctgcagggccgggtccttgttggaattggcgtggctgcaatcgaccatgatgttcggcttgatcttggccttgttcaatgcctgctcgcacagcgcaacgctgaccgaatcatagttgggcttgccgttgccgccgcgcagtaccacgtggccgtaggcattgcccttggtggtgacgatggacacgccaccttcctggttgatacccaggaaacggtgcgggctggaaaccgattgcagcgcgttgatcgccacagtcaggccgccgtcggtgccgttcttgaaacccacggccgaggacaggccggacgccatttcacggtgcgtttgggattcagtggtgcgtgcgccgatggccgaccagctgatcaggtcctgcaggtattgcggggagatcgggtccagggcttcggtggcggtgggcaggcccatctcggccaggtccagcagcaactggcgaccaatgtgcaggccgtcctggatcttgaacgagtcgtccaggtacgggtcgttgatcaagcctttccagccgaccgtggtgcgcggtttttcgaaatagacgcgcatcaccaggtacagggtgtcggacacttccgccgccagcaccttgaggcgctcggcgtactcgtgggcagccttgagatcgtggatcgagcaaggcccgatgacgacgaacaggcggtggtcggtgccatcgagaatgtcacggatgacttcgcggcccttggtgacggtctgcagggcagcgtcgctcaaagggatttcgcgcttgagctgatcgggcgtgatcagggtctcgttggattcaacgtttaggtcattgatcggtaaatcagccatcgtgttactcgtcagggtcacgggtgccggccgccagccatccccgtgcggcggagcacagcatgatttgaatgcaggggggaggaaccttagcgcgtaacaccggcccgcgacaatgggcaaagcccgctttaatccagtgctggcgccacaaaggcttcgtgggagaactcgctggcatggcgcgatacccactcacgggccagggcttcgagttgctggggtgtcggttcggtgtcttcgtgctggcggcagtagcgctctatccggcatgcttgctcacccatgcgtgcaccgaacaacgcatgttcatcggtaaacgagacaccgacgcggtagccgttttccaccttgcggcaccacgccacatagcctggataacgtgcgctggcacccagggacgggatatgcagatcaaccgccgtgccttcgcgccaggcgcgtggccaatggcaggcgatgccgcccaggccgatagcgtgcaggcgttggcgagggatggcgggagagggacgttggattaactcgacagcgacatcatcagggtgaggtaaaaaacgacccatgtacacggactccgagcaccgtccaattgacggcggtggcagcagtatagtgaaggaactggaattgaccgacctggatattgaccagcaattgctgggattgccaggtatttctctggtgatctttaccagcgcagggtgttccagttgccgctgggcacgccagcaagtgccgggctggccgttaccggtggaccggctgtgctgggtggacgccgggcacaacggtggtgcggtcgaacgctaccagatctttcatttgccggcgctgttcgtggtgtgcgagggtcaattccttgggcaaatacagacacgtcttacgcgtgacgacgttttcgatgccgtaaaacaggcactcacccgtccaactgaggatttgccatgacagcagttacaccccagccaccacgcattggcatcatcggcaccggtgccattggtggtttctacggcctgatgctcgcccgcgccggtttcgatgtgcactttttgttgcgcagcgaatacgcggcggtcagcgagcacggcctgcacttgaacagcaccgtgcacggcgtatcgcatctgcatcccgtgcaggcctacgcccgcgctgctgatatgccgccatgcgactggctgctggtgggcaccaagtcgaccggcaacgtcgaattggccccgaccctcgcccaggtggcggcgccggatgccaaggtggtgttgctgcaaaacggccttgatgtggaagacagtctgcgtgaacacttgccggcgtcgctgcacttgcttggtggcctgtgttatatcggcgtgcaccgttctggtccgggcgttatcgagcaccaggcgttgggccgggtcaatctggggtatcacagtggcaccgcggccaatgatgacgcccgccaaaaggagattgtcgacgcaggcgccgcgttgtttcaccaggccggtatcgagtcgcaggccatggccaatgtgcatctggcacgctggcacaagctggtgtggaacgtgccttacaatggcctgtcggtgttattgggcgcggggacctcggcgatgatggcggacgaatccagccgcgaactgatccaggcgctgatggccgaagtggtgcagggtgcccacgcctgtggtcatgagattccccaaagctacgccgagcagatgtttaccctgactgaaaccatggacgattacctgccgagcatgtaccacgaccacgtgcacaaacgcgcgctggaactggcggcgatctacgcccgcccacttgctgcggccagggctgccggctgtgagctgccacggatgcaggcgctgtatcaggccttgagttttattgatcggcgtaaccgctgagcagggggacacaccatggcaaagggattgggcgacaaactggtgctggcgatttcgtcgcgggcactgttcgacctcagcgacagccacaagatctacctcgcccaaggcgtcgaggcgtaccgcaagtaccagatcgagcacgaggaggaaatcctcgaacccggcgatgcatttccgctggtcaagaaactgctgagcctgaacgccagcctgggccgtgcgcgggttgaagtggtgctggtgtcgcgtaacagcgctgacaccggcttgcgcgtgttcaattcgatccagcattacggcctggatatttcccgtgccgctttcgtaggcggtcgtagcccttatccttatttggcggcgtttggctgccacctgtttctttcgacccatgccgaggatgtacgcagtgccctcgatgcggggttcgcggcggcgacgattctgtcgggcggcccgaaccgcgcatccagcgaagaactgcgcattgccttcgacggcgacgctgtactgttttccgatgagtcagaacgtgtgtaccaggccggtggcctggccgcgttccaggccaatgagcgagaggcggcgcgccaaccgttgcacggcggtcctttcaagggttttctggcggcactcaacttgttgcagcgcgagtttcccgatgaggcctgtccgatccgcaccgccttggtcactgcccgttcggcgccgtcacacgagcgggtgattcgcaccttacgtgaatgggatatccgcctggacgagtcgttgttccttggcggcctggagaaatctgcattcctggaggcgtttgccgccgatgtgtttttcgatgaccaggccgggcattgcgagaaagccatggaatttgtcgccaccgggcacgtgccccatggcatcagtaatgaggtgaagatctagggcgctgctaagctgatttcatctccgccatcctggcagtccaggaggttctatgatccgttcgatgctgtacgccacggacctcggtctgtacgcgccttatgtgatgcaacatgcgctggcgctggctcgaacgttcaaggctgacctgtatgtgattcatgtggtcgagcccatcggcctgttcgccgaatcggtgttgcagagctaccttgatgagaaggccttgagtgagtggcaaagccaggggctggctacggtcatggcgacgatcgaacagcgggtgctggacagttttcgcgaagagttgggggacgaggggcaggacctgaagttgattcgctcggtacgggtgatccagggggacccctgcgaggtgatactcgaccaactgcgcaaactttccgtggatctgctgatcgtaggaagtcacagccatgcaaccgcggcggctaccccgttgggtcgtaccgctgcacgggtgctgcagctgtctacggtgccggtctacctggtgccttcgttgcaacgtcgacgcagtgatgacgtgtgatggatgaaaatcgataaaaagttctagatttatccataaaacctttaatatagttatataccgtcgctgatacccgtggcgtctatctgctttgagggacacatatgaagcttcaacaactgcgctacatctgggaagtggcgcaccacgacctcaacgtttccgctaccgctcaaagcctctacacctcgcaacccggtatcagcaagcagatccgcctgctcgaagacgagttgggcgtcgaagtgttcgcgcgcagcggcaagcacctcacccgtgtcaccccggccggtgagcgcatcatcaccaccgccggcgagatcctgcgcaaagtcgaaagcatcaagcagatcgcccaggaattctccaacgagaagaaaggcaccctgtccatcgccaccacccacacccaggcacgttacgcattgccgccggtgatccgcgatttcatcaagcagtacccggatgtggccctgcacatgcaccagggttcgccgatgcagatcgccgaaatggccgctgacggcaccgtcgatttcgccattgccaccgaggctcttgagctgttcggcgacctggtgatgatgccgtgctaccgctggaaccgttgtgtggttgtaccgcaaggtcaccccttggccaagctgccgaagctgaccctggaagccctggccgaatacccgatcgtgacctacgtgttcggtttcaccggccgttccaagctcgacgaagccttcagtcatcgtggcctcacgccgaaagtggtgttcactgccgccgacgccgacgtgatcaagacttatgtacgcctgggcctgggcgtgggcatcgtcgccaagatggcggtcgacacggccctcgacaaagacctggtggtgctcgatgccagcgagctgttcgagtccagcgtgaccaagatcggcttccgtcgtggcaccttcctgcgtggcttcatgtgcgatttcatcgagaagtttgcgccgcacctgacccgtgaagtcatggccaaggcgatccagtgccacaacaagcaggagctggaagaactgttcgacggcgttgaattgcccgtccattaagccagcggtttatttggcctcggtaaccgtaaaatgttgccgggcgcctgccaccagaatctccacctcatcgccttcgaacttgcccagcaggcttttgcccagtggtgagcgcggggtgatgacggtcaacggttgtccaaccacgtcaaccttcaaaccggccgcatccggcgccaggaacagccattgctggcgactgctctcatcttccaggcccagcagggtgccgacttctataccgcgctgatcatcgtaggcccgtaatggctggttctggcacagcgccaacgcctgcttgatctcctcgacgcgcttggcttgcccggccgccaggtaggatgcctccagcccgagggtgtcgtacttgttttcagcgatgttttcttcgtgggtcgcggtttcgtaggcggtctgcgcggcgcgctgggcgatgtcgaggtcgacgctgagcttttccaggatgagcaggtggacggcgtgtttattcatggtcatcaatcgcagaattgcaggacattggcccgggtcttttcgttgggagcgttctggtcctgttgcagccagaactggcatttggggttggacaggttgcgcgcattgttgcgcgcctggtccaggctctgttgctgctcctgtttctgcaggttctgctgatactgctcgaacatgcgattcggcagttcaggcgcggccaccgcaggcttgcccaattgctgcactgcctgggccaccggcgccaggctctgggggaacaggtagcgcgacgccagccaggtggtcagcacgatggcgataaaccccagccatacgccaaacgagatagcggcactgagcttgaacagcgacaacggacgatcagacatgaggccctcctggcaggcattgacggcgtggcggcgattgtcgcacagccaccgtgcagaataatcgtgatcaagccttctgcatccgcacatttatgcggacaatcgaacctttgagcgttggagcccggaatgaaagcccgctgggatattttttgcagcgtcgtcgacaacttcggcgacatcggcgtgacctggcgcctagcccggcaactggtggcggaacacgcctgtgatgtgcgcttatgggttgacgacctgcgcgcattcgaacgcatgtgccctgagattgatgtgcagctcgatcaacaatggcaggaaggcgtcgaagtgcgtcattggccggccgagtgggtgggcgcgcccgcggcggatgtggtgatcgccgcgtttgcctgccagttgccgcctgagtatatggaggccatggccgagcgtgaacgcacgccggtgtggatgaacctggattacctgagtgccgaggaatgggtcgtgggttgccaccggctgccgtcggtgaagttcaagggcgtgcagaagtacttcttcttccccggattccgccccggcaccggcggccttttgcgtgaggccgggttgctggaacagcgtcgggcttttcagcaggatgcgagtgcgcagcaagacttcctgcaaaccttgggtgtgtttcccacagccggtgcgcggctgatctcactgtttgcctacgaaaacgccgggctcgccagttggttggacgagttatcgacggacgggcgtgccactcatctattggtgccggaggggcgcattctgggcgatgtgcagcgctggctgggtctggatcggctggtggcgggggatatccaccagcgcggctcgctgaccgtgcaggtcatcgctttcgtgcgccaggaacaatacgaccgcctgctgtggtgctgtgacttcaatgccgtgcgcggcgaagactcgttcgtgcgcgcccagtgggccggtcgcccgctgctgtggcatatctatcgacaggacgaagatattcacctcgacaaactcgatgcctttctggatctgtacaccgccggtttgtcacccgctgcaaggcaggcgttgatcgggctctggcaagcctggaacacggagggcgatatggcccaaccgtggaaaatgctgctggaacattggccggaggtcagccagcatgccgaaacatggtgtctggaacagggcttgcaggccgatcttgcgacggcgctggtgaagttttatgaaagttggatatgatacgccaccttgaattttgtaaatcccatccaaatttcggatatatgcaatgaaaactggtaaagaactgaaacccggtacagtgatccgtctcgaaaacgacccttggctggttcagaaagctgagttcaccaagtctggtcgtaacagcgccatcatgaagaccaagctgaagaacctgctgaccggttacaagaccgagatcgtctacagcgccgatgacaaactggacgacgtgatcctcgaccgcaaagaagcgaccctgtccttcatcagcggcgacacctacacgttcatggacaccaccgactacaccatgtacgagctgaacgctgaagatatcgaagctgttctgccgttcatcgaagaaggcatggaagacgtctgcgaagctattttcttcgaagagcgcctggtttccgtagagctgccgaccaccatcgtgcgtaaggtggcctacaccgaaggttccgctcgcggcgacacttcgggcaaggtgatgaagcctgccaagctgagcaacggtaccgaactgcaagtggccgatttcatcgaaatcgacgacctgatcgagatcgatacccgcgaaggcggttcgtacaaaggtcgcgccaagaagtaattctggccccgccgctacgaaaaaaagcccgaccttgtgtcgggctttttcgtgggtgctgcctttacttcaggtgttgcttcagttcatccgaggcctgtagcagtgcggagcgtacggccggcacctggctgaccacattgagcaaaccgtagtcgtggatcatgccgttgtagcgcaccgccgtcaccggtacacccgcctggtccagtttgcgagcgtaggcttcgccttcgtcacgcaacacatcggcgccggctgtctggatcagcgcaggcggcaagcctttgagctggtcggtggtggcccgcagcggcgaggcgtagatctcggcgcgctgggtggcgtcggtggtgtagttgtcccagaaccacttcatcatgttgcgggtcaggaagtgcccttcggcgtactggttgtaggacgctgtgtcgaaattggcgtcggtcaccggccatagcaacaattggaacttgatcgccggcgtgcccttgtccttggccatcaggctgaccactgccgccatgttgccgccgacgctgttgcccgcgaccgccaggcgcttgccatcgacattgatctctttaccgtgctcggctacccattttgtggcgccgtaggcctggttgatcgccaccgggtaatgggcttccggcgaaggcgtgtagttgacgaacaccgccactgctcccgaacccaccaccagatcccgcaccaggcgctcatgggtcgggtaatcccccagcacccagccgccaccgtggaagaacatgaacacaggcaatgtgcccttgaccccggctggccgcacgatggtcaggtccagcggcttgccgtcgacctggatggtcttctggctcacatccgccttgggcaaggtcagcttcacaccggcctgggcgccggtcagtacggcacgggcgtccttgggcgtcagttgttccatcggtttgccggtgcctgcgttcaacacatccaggaaggactgggtgttgtgctcgacatcacctgtcgccgcaaaggcgtgggtgatggacaaggcgagcagggtgccggtgagcgctttaccaattgtgttcattgctttctccaggggcggccgagggcatttagacggtcacgtgcaggcgaacatcgacgttgccacgtgtggcgttggagtacgggcagacttggtgagcggcgtcgaccaggctttgcgcgtcgtcctgggccaggcctggcaggctgatgtgcaggtcgatgtccaggccgaaaccgccggggatctggccgatgccaacgtgggcagtgatcgacgcgtcatccgggattttgcgtttggtctggctggcgacgaatttcagggcgccgatgaagcaggccgagtagccggcagcgaacagttgttcggggttggtggcctggccaccggcaccgcccagttctttgggggtggagagtttgacgtcgaggatgttgtcgctggaaacagcacgaccatcacggccgcctgtggcggtggctactgcggtgtagagcgtttgcatggtgttttcctctttgttgttagcgctaaatgtttgcgcgctaagtagttggtgaggcgaatgtatagcgctaatgtttagcgcgcaagataaattttcaaattttttcaaattcaacctgcaggggccggcttggcggctcctgcaaggggagaggtttaaacgctggcttgcaggttggcgcgcaacgcgatcaggtcgctttgcaacttgcgcaattgctccagctccaggccgctggcacccaggatgcactggggaatgcccatggccttgtcttgcaacgcccggcctgcgtcggtcagctccaccaccaccacgcgttcatcttcacggctgcgggtacggctgagtacaccttcggcttccaggcgcttgagcaatggggtgagcgaacccgggtcggtcagcaggcggctgctgatttcgccgacagtcaaaccatcctcttcccacaacaccatcatggccaggtactgcggataggtcaggccaagcgcttgcaacaacggcttgtagaccttggtcatcagcagcgaggtggagtgcagggcgaagcacagctggttatccagcatcagcgattcgcacggatcagggttcttactcatggctgtacctcgaaaaagcatgtctgggctggaatctagcgggcaaatctttaatgcgccagataattctgtccgagcggtcagaccaagccactctgtagcgccaggtcccaaggtggcaccggactgaagcgcgatttcagatattccagcagcagtcggctgcgggcattgggctgctgttccaggcgcagcgcatagatgccggtggtctcgggactgggcaggccgccttcgcagaacaaaggtagcagttcgccgcgcaccaggtattcgctggccagccacgtggggaggtgggcaatgcccagcccggccaaggcgccagacaacaaggcttcagcgttattggcgctcatgcggatgcgctgcggtcgataggtggcacggcgcccatccagctcgaagcgccaggcgaacgtcggcgccaggccatcccagtccaacccgtcatgttcgctcagttcccgagggtggatcggcgtgccccggcttttcagataggccgggctggcgcacgcgatgcgcacgatgctggccaagggcgtggcgatcaaccgcgtgtcgacgagatggccggcgcgcagcactaggtccaccttgcccaggtgcgcgccctgcatatccacaaagctgtcgatcagatgcaggtgcacatccagtcccgggtagacattgaggaaatccgcgatcaccggcgccagatgccgtcgaccaaatgccgctggtgcatcgactcggatgaggccttccggcgcatggctgagggacaccgcttcggcccgcgccagttgcagctcgctgacaatccgccgtgcccgctcggcgaaggccaggcccgccggagtcggcactacggcgtgggtgctgcgctggaacaagcggctgccaaccgagctttccaggctgtcgatccgccgggctactgccgagggcgtcagcggatgacggcgtgcggccgcggagaaactgccggtttccagcacatcgagaaacaggctcagttgatcggtcagaggattggggttcatcgtaacgtcgcttatgcgagattggcacagccattgtgcgttgctgtgcgtttccgcgccagagccgactgcgtagcatgcaaggcctgggattgcggagtaacaagcggtgttggatttagtgatgtacctgatcttgggcgcggccctcggcacggtgggcggcctgtttggcattggcggtgggttgattgcgatcccggtgctgggcgtgttgttcggcctggaccagcaattggcccaaggcaccgccttggtaatggtggtgcccaacgtgatgctggcgctgtggcgctatcaccagcgcaaccgtatcgagctgcgccatgcgttgccgctgggcgtcatgggtttcacgtttgcctggctgggttcgatctgggcggtggggctggatgcgggtgcgatgcgcatcggttttatcgccttcctgttgacgctatccgcctataacctgctgcgcatgttcacccgtaacgcgccgccgacggcgcagatgcgttattcctggccatggcttggggtactgggtgccgcctccgggtccatgggcggtttgtttggcgtaggcggggcagtggtcgcaacgccggtgttgaccagtttgttcggcacaacccaggtggttgcccaaggtttgtccctggccttggcattgccgagcaccggcgtgacattggtcacctacgcctggcaccaggaagtggactggatgatcggcgtgccgtttgccgttggcggcctgctcagcatcagttggggcgtgaaggtcgcccatgcattgccggagcgcgtgctgcgcggtctgttctgcggcttcctggtggtgtgcgcggtgatgctgacttttaaagtttgaatccttcgaggatgtactccgccaggcagtcggtgatgggggaggtcatcgccgggttgcgtagcaatcgaagcgtcatcgatggcagcggcggaaaaccttcttcgctgccgagcacccgcagatcgtcggtcaccaggctttccatgctgaccattaccgccaggccggaactcaccacggcctgaatcgccgccacgttggaactgtggtaggccagtcggtagtcccgccccgcggcgtccagtgccgcacgggtccactgggtgcagaagctgtcgaccccggaaattgccagcggcagcgcgtcgtgttcgtccacgcagaagcacggcgcggccacccacaccatgcgctcggtgcgcagcaactcgccaatttcattgccgggttcgcggctgataacggtcagcgccaggtcccggcgctgcatcaacaccgtcgacgcctcgcagtgcatctcgatctggatcagcggatatgccttggaaaaccgcttgaggatgcctggcaggaaacgcatcacgtagtcgtccggcgtgccgatgcgcaccaacccgaccatgtgcggctcgcgcagggtgttgaacacttcgctgtgcagtttcaggatgcgccgcgcatagcccagcaagacctggccctcgggcgtcagccgcacctgccgaccatcgcgttcgaacaacttgcgctgcaatacgtcttcttccaggcgtttcatctgcatgctcaccgccgattgtgtgcggttgacccgttcgccagcgcgggtaaagccgccctcgtcagcgatggcgacgaaggtgcgcagcacttcagtgtcgatgctcgggtagccggacaattgatcaatctccgagatgcattgcataaaaaacattcgttggattgatcataaggccaggcacacacttgcgccatccccactggagggcgagaagatgaaaggtcaaagaggttttgtattgctggcgaaacgtccgtttgccgggctgtttcacaaggttgcgcgctggcaggcgctgcatgaggagcgccagatgctggcgaccttgagtgatgatgcgctcaaggacatcggcctcaatcgcggcgacgtggagcaggagcgccacctgcatttctggcaagacccgctgcgaaaataatcgcggatgcagtagggtagtcggcgagtccccacggagaaacccatgcccgccgacctgtctttttcactcaagcaagctcgacgcatggcgctggcggcccagggtttttccggacgccaggcgcctgcactgatcaaggctgcgcacctcaaccgcatgatcgagcgcctgggcgtgttgcagatcgattcggtcaatgccgtggtgcgctcccattacctgccgctgttttcccgcttgggcaactactccccgctgatacttgaacaggccgcctggagccaggggcggcggcgttcgctgttcgaatattgggggcatgaggcatcgctgttgccgatggcgctgtacccgctgatgcgctggcgcatggagcgggccaggcaagggcagggcatttattcgcaaatggcacgttttgggcgtgagcaacaggccactattcagcgggtgctgcagaccgtcgagcaacagggcgcgctgggtgccggcagcttgtcgacccgcgaggagcgcgccggcccgtggtgggactggagcgacgaaaagcacgcgttggaatggctgtttgccgctggcctggtcacggtcgccggccggcgcgggttcgagcggctctatgatttgccggagcgggtcattcccggcgatatccttcaaacctctgtgactgaaaccgaggcccagcgcggcttattgctgcacagcgccaccgcgttgggggtcggtactgaaaaagacctgcgtgattacttccgtctcgacccggccgacagtcgcactcgccttgctgaattggtggaagacggtcgattgttgacgtgccaggtacaaagctggaaacaaccggcgtactgcctgcccgatgccaaagtgccgcgcaaagtgccggccagcgccttgttgtcgccatttgattcgctggtctgggagcgcagtcgcaccgagcggctgttcgacttccgttaccggctggagatctataccccgcaagacaagcgggtgtacggctactacgtgctgccgttcctgcacaacgagcggatcgccgcgcgcgtcgacctgcgtgccgaacgcgccaatgggcgcctggcggtgcatgcggtgcacgaagaagagccggggttggatgaggaagggatgttggcgctggcgcagaacctgcggcaaatggccgactggctggggctggagcaggtgcagctcaactgccaaaggcccagtgccgaccggttgcgggcggcgatgatcagcatgggggttggtctttagggcctcatcgggggcaagtcgaatcgtcgcaccgcccctcccacacttgaatgtattcacagatcaaaatgtgggagggggcttgcccccgatgaggccctgaaggcaactgaaaactcagcgtttgacttgcttcaatgtctcggcaatcagaaacgccaactccagcgactgatcggcattcatgcgtgggtcgcagtgggtgtgataacggtccgacaatccatcctcggtgatcggccgcgcgccaccgatgcattcggtgacgttctgcccggtcatctcgatatggatcccgcccgcataggtgccttcggcctggtgcacctggaagaattccttcacctcgcccaggatctgcgcaaagtcgcgggtcttgtagccgctgctggccttgatggtgttgccatgcattgggtccgagctccacagcacttgcttgccctcgcgctgcacggcgcgaatcaggtggggcaggtgatcgccgaccttgccggcgcccatgcgcgcgatcaggttgaggcggccggggtcgttgtccgggttgaggatatcgatcaggcggatcaggtcatccgggttcatgctcggcccgaccttgaccccgatcgggttgttcaccccgcgcaggaactcgacgtgggcaccgtccaactggcgagtgcggtcgccgatccacagcatatgcgccgagcagtcgtagtagtcgttggtcaggctgtcgcggcgcacgaaggcttgttcatagttgagcagcagcgcttcatgggcggtgaagaagctggtctcgcgtagttgcggcgagctgtccatgccgcaggcgcgcatgaaggccagggtttcgtcgatgcggtcggccaactggctgtacttctcggccagcgcggagttggcgatgaaatccaggttccacttgtgcacctggtgcaggtcggcaaaaccgccctgggcaaaggcgcgcagcaggttaagggtggcagtggactggtggtaggactgcagcaggcggtccgggtccggcacgcggcttttttcgtcgaaaccgatgccattgacgatgtcgccacggtaggcgggcagtgtgacaccgtcgatggtttcatcattggccgaacgcggcttggcgaactggcccgccatgcgcccgaccttgaccaccgggcagccggcggcgaaggtcatcacgatagccatttgcagcagcactttgaacgtgtcgcggatttttgcggcggagaactcggcaaagctctcggcgcaatcgccgccttgcagcaggaatgcgcggccctgggtcacctcggcaaactggcggcgcaactcgcgggcctccccggcgaacaccagtggcgggtagctggccaggttctgctccacttgcagcaagtgtgcagcgtccgggtaccggggttgttgctggatcggcagggcgcgccagctgtcggggctccagggttggctcatcatgaactcgattggctgattgacggtggggcgccaatgttatcagcaattagtgcgtgacctgttgccgtcggttggccgacaatcgcgcctttgccgtgcagcaaacccgttaggagtagtgatgaccgaggagcgtgtcgagcgcctgctggccgaagtccatgatgatttcggcatgatccgtgtgctcgaagtggccgattaccgttttctcgagtttggcgacgccatcgagcaaagctgcgtgttcaccgctgatccgagctggctggagtacgactacacccgtgcgatgctgatcggtgcgttgtgtcatgaacaacccgagagcgcgctgttcctcggcctgggcgccggcacgctgacccaggcgtgcctcaagttcctgccgctggaagatgtggaagccatcgaactgcgccccgatgtgccacgtctggccattgagttccttgggctggatgacgacccgcggctgtacatccgcattggcgacgcattgcaattgctggagaccgccgagtcggccgacctgattttcgtcgacctctataccgatgtcggtcccggcgtcgggcatctggcgtggaccttcctggagaactgccagaaaaaactcaaccctggcggttggctggtgatcaaccaatgggccaccgatgatggcaagccgctgggcgcggcattgttgcgcgggttgtatcaccgtcattactgggagctgccggtgaaggagggcaatgtgattttgctggtgccttcggagctggatcaggcgctggatctggaggcactgtccgctcgcgccgaggccctggcatcgaagttggggtattcgttgcagccgttgatcaaggcgattcgcccggcgacctgagctagatgcctttgaatatgccgggtcgcttctcaatcattgcccgcacaccttccttggcatcctcactgttgagcaatttgtccaccatcggcggcaacgcctcagccgccacggcttcgccttccatgcgcgccagccgtgccgacatcaacgtagcctgcacgcccagcggtgcctggcgggcgatgcggttggcgagttcgacggcgcggggcagcaagtcctcgctggccatcacttcctgcaccaggcccaggcgcagggcttcatgggcatcgaattcgtcgccggtgagcagccagcgcatcgcgttgccccagccggcgatctgatgaaggcgcagcgtcgcgccgccgaacggaaagatgccacgctgcacttccatctgcgcaaagcgcgtgttgctcgcacagaggttgatatctgcggccagcatcaactctatcccgatggtcaggcagtagccctgggccgcgacgatcaccggtttgctcacgcgcgggccggcaaacacgccccacggatcacaaccgcccagaggcggctgccagccactggccatcacgctgctgacattggccaggtccagcccggcggtaaagtggtcgccatgggcaaataccacggccacccgagcgtcgtcatttcgatcaaattcgccatacgccaggctcagctcattgagcaggtcgaggtcgaacgcgttgcgtttggccacccggtccagacccaaaagcaagacatgaccctggagttcacggctgacgcggctgctgctggcttgattcatcgggtgtgccctcgggcgcggggaaaggtttcggaccaaaggaccgcaaaggtcaggtgaaccgtttaagcgttatgaccagcagggccgggcctctgaaaaatagaccctggcggtgttatctgcaaagactgtgatgcagcgcggtttatcggtgccttacgataaaaaaagctccctttttcagctatttccggtatagtgcgcgccggcctttaaccgggccgcgtttaggtagcgcaattccccgaagtcagcttcggctgcacgtccgcacagcggactctcccttgacgaatctttttcattcattcgttttcgcaaatccccgccgacaaagcagccagggcgactcttgagtctcaacacggcatgcgcagctttggagcatgggtctttgcggatgcacttagaggcagacccatgacccaggaaaccggcggcttcgccgcttttaatcttaacccgaatattcttgcagcagtcgcagcgaccggctacgaagaaccttcggcgattcagcagcaatcgatcccgatcatcatggccggccaggacatgattggccaggcgcaaaccggtaccggtaaaaccgccgcgttcgccctgcctatcctgcattgcatcgatcctgccaagcgcgaaccgcaagccctgatcctggcgccaactcgtgagttggcgctgcaagtagcaaccgcttttgaaacctacgccaagcaaatgccaggcgtaaccgttgtggccgtttacggcggcgcgcctatgggcccgcaactcaaggcaatccgcaatggcgcacagatcgttgtcgccaccccgggccgtctgtgcgaccacctgcgtcgtgacgagaaagtcctgtcgaccgtgaaccacctggttctggacgaagctgacgaaatgttgaagctgggcttcatggatgacctggaagtcatcttcaaggcactgccaccgacccgtcagactgtattgttctcggccaccctgccgcagtcgatccgtgccattgccgaacgccacctgcgcgatccgcaacacgtgaaaatccagaccaagacccagaccgttaccgcgatcgaacaggctcacctgttggttcacgctgaccagaagacctcggctgtattgagcctgctggaagtcgaagacttcgacgccctgatcatgttcgtgcgcaccaagcaagcgaccctggacctggccagtgccctggaagccaagggctacaaagccgctgcgctgaacggtgacatcgcccagaaccagcgtgagcgcgtgatcgactccctcaaggatggccgcctggacatcgttgtagcgaccgacgttgctgcccgtggcctcgacgttccacgtatcacccacgtgttcaacgttgacatgccatacgacccagagtcctacgtgcaccgtatcggccgtaccggccgtgccggtcgcgaaggtcgtgcactgctgctggtgactccgcgtgagcgccgcatgctgcaagtgatcgagcgtgtgaccggtcagaaagtcgctgaagtgcgcctgccggatgcccaggcagttctcgatgcccgcatcaagaaactgaccaacagcctggcgccactggtggccgacgctgaatcgacccacggcgacctgctggaccgcctgaccgccgacatcggttgcaccccgcgtgccctggctgcagccctgctgcgcaaggcaaccaacggtcaggccctgaccctggcggccatcgagaaagaacgtccactggtgccgaacagcgcgccacgcggtgatcgtccagagcgttccggcgaccgtccagaccgtggtgatcgtgagcgtcgtgctccggttccattggctgaaggccgtgcgcgttgccgtaccgcgctgggcgcgcgtgatggcattgctgccaagaacctgctgggcgctatcctcaatgagggtggcctggcacgtgaagccatcggtcgcatccaggtccgtgacagcttctccctggtggagctgcctgaagacggtctggaaaaactgctgaccaagctgaaagacactcgcgttgccggtaagcagctcaaactgcgtcgctaccgcgaagattgatccgcccttgggctgattgatcgcaagtaaaaaatccccgactggttcggggattttttttgcctgaaacttaccttagccgaagcggtagatgtccatgcccagcgcgcccatggtgaatccctggtgtgccacgctgaattcgccaccggcacctcgtgcaaagtacagcggcagcaagtgttcatcgctgggatggctgcgcacggcattcggtgccaggcggcgatagtcgtgcagcgcggtttcatcgttggctgccagcttatccaccacccaatcgcggaaatcccgcgcccatggctcgatgctctccggtcccgcgtgccagtccaactcgcccaggttgtgggtgatgctgccagagccaatcaacaacacaccttgctcacgcaggcccgcaagagcatgcccgacgcgggtctgcagggcaggccccatacgactgggcaacgacacctgcaccaccgggatatctgccgccgggtacatcagcgacagcggcacccaggtgccgtggtcgaaggggcgacggtcatcgatgcgcgcaggcaggccatcggcgtgcagcagctcgacaatcttgccggccagctgcgggtcacccggtgccgggtactgcacggcaaacagcttgcgggggaagccgccgaagtcgtgccaggtttcgggcgcggcgctgccgctgaccaggagttcagagctttcccagtgcgccgacaccaccacgattgcctggggccgtggcatctcggccgctagccgttgcagcgccgggccactggcgccgggttgcagggcgagcatgggcgatccgtgggagataaacaggctggggagcataagtagggtcctgagcgttaacatgggcccatcttcaatcagatcattgatctaaatctaatataagttttagtgccatttgatcgaatttcatggaggatctatggagcctaagttttggcaggagcgctgggcgaataatcagatcggctttcacttgcccgaggtcaacccctacctgcaacggcactggccgcggttggccgatggcgccaaagtattggtgccgctgtgtggcaagagcctggacctgatatggctggccgcccaaggtttgcatgtgctcggtgtagagctttctgagcaggcggtcgaggcgttcttcaacgaacaaaatctcgtcccgcgaatcaccgaacgtggcgcgttcaaggtgtaccaggcagatttgatcgaagtgtggtgcggcgacttttttgccctggagcctgaagtgttagctggttgcgctgcgctttatgatcgcgccgcactgatcgctttgccgccgctgatgcgtgcgcaatataccgagcatttgaatgcttgcctgcgtcctggctgtcagggcctgctgatcacccttgactatgaccagacgcaaaaagccggcccgccctttgcggtggctgacgatgaggtggcggtgctgctcgggccgcactgggcgttgaaggtgcttgaggagcaagacatcctgggggagagctggaagtttgtgcaggacggcgtcacacggctggatgaacgggtgtatcagttaaccaggcgctgaatttaccgatcgctatcgggggcaagccccctcccacttttgatgtgtgaacgcatgcaaaatgtgagagggggcttgcccccgatgaggccttcagacctgcaaaaaaggggcgatcagatcgccccttttttgtgttgctgtcgcctgtcagccccgacgacgcaacgcgtcgatccgttcttccagcggcgggtggctcatgaacaggcgagccatgccctgcttgataccgccgttgatgccgaaggcggtcaggctgtccggcatatgcaccggcaggccttgttcggagcgcaggtgttgcagcgctgcgatcattgccccggtaccggccaggcgtgccccggcttcgtctgcacggaactcccgtttgcgcgaaaaccacatggtgatcgcgctggccaggaaacccagcaccacttcggcgaagatggtcgccacgaagtaggcaatgccgcggccgccttcgttcttgaagatgaccttgtcgacaaagttgccgatgatccgcgcgaagaacatcacgaaggtgttcaccacaccctggaccagcgccaaggtgaccatgtcaccgttggccacgtggccgatctcgtgggccagcacggctttcacttcgtcgtaggagaagcgttccagcatgccctggctgaccgcaacgagtgcgtcgttcttgttccagccggtggcaaaggcgttggcttcataggccgggaagatcccgacttcaggcatcttgatgccggcctcgcgcgacaactcctcgacggtttgcagcaaccattgctcatgccgggtacgtggctgggtgatgacctgggtgctggtgctcatcttcgccatccacttggagatgaacagcgagaacagcgagccggcaaaaccaaagaccgcacagaagaccagcagctgattgaggttcaggtcaaccccgttggccgccatgaacccgttgaagccgaaaaggctcaaggtgatgctggcaatcagcacgaccgcaaggttagtggccaagaacagcaggatgcgcatcatggttgtagagttctcctcatgcttaatatgtcgcgtactgcggggtatataaggtgccgcatggggtgattcaaccgagcgactatttcaaactgtgtcctacagcctgaatgtagaggcttgaagggaatttccgatagggaaaaggtcgtttgatcggttcaccgttgccttgaagccctgtgattatggggtgtggggggctttttcggcgccagcgaggtggcaaggtagaagaggggcagagaagtgttgccagatactcgccgtacgaccgattgtcggtcgtacggcgccgtttcccttactggcgataggacttgaggaagttgccgatacgaccgatggccatgtccaggtcatccacgcgcggcaacgtcaccacgcggaagtgatccggccacggccagttgaacgcggtgccttgcaccaccagtagcttttccgacagcagcaggtcgagcacgaacttttcgtcgttgaggatcgggcataccttggggtcgatccgcgggaacgcatacagcgctcccatgggttttacgcagctgacgcccgggatcgcattgagcagttcccaagtgcggttgcgctgctccagcaggcggccttggggcaggaccaggtcattgatgctctggtagccgcccaaggcggtctggatggcgtgctggctcggcacgttggcacacaggcgcatgttggccagcatgtcgatgccttcgatgtagctctgggcgttgtgcttgggaccggagatggcgatccagccggagcggaaacccgccacgcggtaggacttggacaggccgttgaaggtcaggcacagcaggtctggcgccagggaggcagtgcatacgtgcacggcgtcatcgtagaggatcttgtcgtagatctcgtcggagaacaccaccaggttgtgctggcgtgccagctcgagcatgcccagcagcacttccttggagtaaacggcgccggtcgggttgttcgggttgatgatgaccagggccttggtgttcggggtgatcttggccttgatgtcggccaggtccgggaaccagtcggcgccttcgtcacacaggtagtgcaccgggtggccaccggccagggtcacggcggcggtccacagcgggtagtccggcgccggtaccagtacttcgtcgccattgttgagcagggcctgcatggacatcacgatcagttcggacacgccattgcccaggtagatgtcctcgatgccgacaccttcgacctgcttctgctggtagtactgcatcacggccttgcgcgcactgaacaggcctttggagtcgctgtagccttgggcagtgggcaggttgcggatcacgtcctggaggatttcgtccggcgcttcgaaaccaaagggcgccgggttgccaatgttcagcttgaggatgcgatggccttcctcttccaggcgtttggcgtgcttgagcactgggccgcgaatgtcgtagcagacgttggcgagcttgttcgatttgctgacctgcatggcgatgtgatcctgaaaatgaacgatccagacggtgtgggcactaccgtactgtgaatcctgcgaaggccgcacccataaatacgtttgaatgccggtagcgcgggtgccagactggcgttttgaagaggcgcaatcatacgtgccgcctgatccatggaaaagacacagatcaggctttttcagttgccgaggtgtaccgatggaaaagttgcagaaaacgctggaggaatggcgggaaatgctcgaccccgcgcaatatcaggtgtgtcgactgaagggcactgagcgcccgttctccggcaagtacaacgccaccaccacggatggcgtgtaccactgcatttgctgcaacgaaccgctgttcgattccagcaccaagttcgatgccggttgtggctggcccagcttctacgagccgatcgccgacagcgcgatgatcgagatccgtgacgtcagccacggcatgatccgcaccgaagtcacctgcgccaaatgcgatgcgcatctggggcacgtgttcccggacggcccgccgccgaccggcttgcgttattgcatcaactcggtgtgcctggacctcgtcccgcgttgaattgaacggcgcggcaccctgtaggagaccggattactggcgatggcgatctcacggacgctatcgccggcaagccgggctcctacaagggaggggtgatagcgagatatcaatttcgccaattaaattgagtacaatttaattgcatactatctttttccttcttccccccaatcgaggcactgccatgagcaacaacctgctgagcatcccttgcaccaccatcaagggtgagcaaaagaccttggccgatttcgccggcaaggccatcctcgtggtcaacactgcaagcaagtgcggtttcactccacagtacaaaggcctggagcagctctggcagcagtacaaggaccagggtttggtggtattggggtttccttgcaaccagtttggcaagcaagagcccggtaacgaaggcgcgatttccgaattctgcgagctgaattttggtgtcagcttcccgctgttcaaaaagatcgacgtgaatggcagcgacgcccaccctttgttcgtacagctgaaaaagcaggcaccgggcctgctgggttccaaggggatcaagtggaacttcaccaagttcctcattggccgtgacggccaggtggtcaagcgttttgccccgaccaccaagccgcaggacctgacccaagagattgaagccctgctcaaatgaccgtctccctggcgctcgaccatcaactgtgtttcaagctctacgcagcgtcgcgggcggtgacccgtgcctacaagccgatgctggatcaactcggcctgacctacccgcagtacctggtgatgctggtgctatgggagtggcatgccgcaacgccggcgcaacccacggtcaaggccttgggcgaacgcctgatgctcgactctggcacgctcacgccgctgctcaaacgccttgagcagctcggctgggtcaggcgccagcgcagcgccagggatgagcgcgaagtgcacctgggcctcagcgaaagcggtgtgcaactgcgtgaccaggcccatggcctgaagacccggctgctgtgcgacagcggtatcgacctgaaccaggccgacacgttgcgcgatggcctcgaccagttgctccggcagatcacagacttgtcgccttcggcacccacaggtccagcaatccgctgagctcctcgcggcgaaacggcttggccaggtagtcattcatgcctgcggcccggcaacgctcgcgttcttccgacagggcgttggcggtcagtgcgacgatcggcaggtccggccagcgcccgctgcgacggatctgtcggctggcctcgtaaccatccatcactggcatattgcagtccatcagcaccatgtcgaagggttgttcctcaagcagcctgagtgcttcgccaccgtgggcggccacgatcacctcacaccccagtttgccgagcatgcccttggccaccagttggttgaccgggttgtcctccaccagcaggatgcgcgcccggtgcatcaggggcgcagcgtccatctggatcgggtcgaggatcagttgcgcttcgctgcgcaggttacgttgcaggatctgatacagcgcgttgcggctcaacgggcgcgcctgttgctgcaacggtgccagtgccgcgacttcttcgctgggcatgaaattgccataggcggtcaccagcaggatgggggcgctaatggcggggcgcaggcggaacaggcattcggggcagtcggtgatcagcaggtccggggtttgcccgctcaagtcatcgtcttgcgtatagcagtgcggtgtcagcccccagtggggcagcagggtggtgagcagctcggtcaggccactgccgacactggtaatggcgatgacgtcacccttgagcggtgtcggttgcaccgcaggcaaatggatcggcaacggcaagtctgcgcagaattggctgccgaagcccacctccgagctgatgctcaagcggccctgcatggcttcacacaggttgtgcgtcaacgccaggcccaggcccgtgccgccaaactgacgggtgatgccggcaccggcctgggtaaagggttggaagattttcacctgggcttcctgcgcaatgccgatgccggtatcacacacctcgatgcgtacccggccctcctgcgcgctgaggcgaacatccacacggccgaagcgcgtgaatttcaaggcgttggacagcaggttactgacgatttgccgcacgcgggtcgggtcacccaagacctgggcgggaaactgcgggtcgatcaggcaggtcagttcgacgctcggcgccgcgttctgcgacagcaggttggcggtgtcttccaccagtgaacccaggtcgaacgggatgtgctccagctccaactggccggcgtcgaacttggacaggtcgaggatatcgttaagcaattccaccagcaccttgcccgagtcatgggcgatggacagttgctggcgttgctcggcgttgagcgggctgtccagcgacagcgcgatcatccccagcaggccattgagcggggtgcgaatctcgtggctcatgttggccaggaaggccgcccgcgcctgggccatgcccagtgcatgcatctttgcggattccagttcatcgttggactggctcagccgctggttgctggccttgagctccagggtgcgggcggagacgatgtcttccagttgccccaggtactcggtcagccgatcttcagcgtgacggcgttgctggatctccgtctccatgttctcgaactgctggttggcaacgttcaccagcacgccgatctcgtcgtgctcgtggcccggcgggcagtccaggcgggcctgccggcgattgctgagctcgcggatgatgcgcaccaaaggctgggtcaacatcacgtagaacaggcccagcaggatgccggtcagcaacaggctgcgggcgaagccgttgagtagcgtgatctcggcacggcgcagaaagcggctgccaaaggcgtaggtgtccacatccaggcgcagcaccccaagggactcgttgggcatgtgactgaggaacagccggtcctcaaactggcggttggcaccgaacaggaagtcgctgataggacggtaggtgctttctttgcgcgggctgtcgacatcggccagcaccacgccgttgttgtcgatcaactgggcgtgaacgatggcgggggagtgcaaaaggcccagggtcaattcctgggccagttcggcgtcgatgttgtaggcgatgcgtgacgcggggttgtggctgatttcgatcagcgagcgaatttcacggttgatggatgcgtcttcgctggcataatcgataccgatttggatcaggctgagcaaggttcccaagacgaaaccgaccagcacagtcaatctggcttgtttataagacaagcggtgggcgaacttgatatccatcgagtgttgaaccacttcacgtttcccttcgcccggcaagcatagctgaacatccacaagctctggcttacccggcatgaatcgttttttacgcagcctcgtgcggtctgccgcagggttgccaatacgccatcttttgcaagaacttgccagaggaataatcgtggactctcgattgaatgcctttcttgaacgggctgaaaccgtgctcgcccgcctggagccgttgttgcccgcgccgcgccaagccatcgattggaaccagtgcctggctgcgcgctggcagcgcgaaggccgcagtggtttcctgttgccgctggacgtgagcctggacatgcgcctgtccgacctgattggcgtggacaagcaacgtgaaacactggcgcgcaatacccagcaattcatcgatggcctgcccgccaaccatgcactgctgtggggttcgcgtggcaccggtaaatcgtccatggtgcgcgcgttgctggcccagcatgccaaggcgggcctgcgcctgatcgaaatcgagcgtgatcatctcgctgatctgccgcgtgtggtcgagcaactgctcaagttgccgcagcgctttatcctgttctgtgatgacctgtcgttcgaggccggcgaaggcgattaccgcgtgctgaaaagcgtgctggacggctccctcgaacaggctccggaaaacgtgctgctgtacgcgacctccaaccgccgtcacctggtcccggagaaccaaagcgacaatgacaactggaaacgcgtggatggcgagctgcaccccagcgaagcggtggaagacaagattgccttgtccgaccgttttggcctgtggctgtcgttctatccgtttacccaggagcatttcctggatgtggtggagcactggatcggtgagctggcgagcaaggccggtttgcaatggcagcgcgatgaagccctcgacatcctcgccgtgcgctgggcgaccggtcgcggcaaccgcaacggccgttgcgcgtaccaatttgcccgttactgggtaggccttaaattgttggagcttcaaccatgatcgatctaaatagcgcaggcaccggcctggatggctatgcgatgctctgcgcgcaactggagtcgctgctggccgatgagcgcgacttcatcgccaacagtgcgcagttctccgctttcctgttcaatcaactggacgacttgaactgggccggcttctatctgaaccgtaacgaagagctggtgctcggaccgttccagggccagatcgcctgtgtgcgcattccctttggtcgcggggtctgcggggcggcggccgcaacgcggcagacccagcgggtggaggatgtgcatgcgttccccgggcacattgcctgcgacagcgcatcgaacagtgagctggtggtgcctttggtcaaggacggcaagctggttggcgttcttgacctcgacagcccgtcgctcgcacgctttacgctccaggaccaggcgggcattgaacagctggcggcgattttcctgcgtctgaccgactgctgatcacgcaaggggcagcaatgccccttactgaccctccgggctgtggagttgcacttgcagcaaccgctccagttccagcatgaacttttccagggttttcgcacccgcctcgattaacgcccagtcatcaccacgggcacacgcctgttcgagggtttcgcactgcccggccaatgaggccgcctgaacaatacgggcggcacccttgatcttgtgggcctgctcaatgatctcctgaagcggggcgtgtgcggttatcagcgcggtcagtgcctggcgatcattccggctgctgctcaacagctcctccagcagtcgcccattcaactgtggatcgccgccggtcaacgcctcgaagttgccaaggtccaggtgcaagtccactgttttaggggcgatctgcgccagttgccgctccagggtcgtgaggctgatgggtttgaacaggcaatcgttcatgccggcctgagcacagcgttgtttctcttcaggctgtgcattggcggtaaacccaagcaccacgcacggtgccagttgctcgcgctgttcgtattcgcgaatcgaacgactcaactcgtagccattcatgatgggcatgttgcagtcggcgatgaccaagtcgaagcgttcctggcgccatgcctggaaaccggctgcgccattctgggctgcggtgaactggtggcccaggtagcccagttgctggcacatcagcaagcggttggcgggatggtcgtccaccaccaacacattgagtaccggcgtggttgcgggcttctcgggtttctgttcatcggctgcctgttccggctgcagtcgcggcattcgcaggttgacatgcacctgggtgcccaccatgggcacactgctcaggctcagctctccacccatcattgcgcacaggctgcggcagatcaccagccccaggcccgcgccgctcctggcgagctgcccggaattgtcggcctgggcaaagggttcgaacaggcgtttctggtcatcgcggctgatacctatcccggtatcctccaccaccagcttcatctcgacctgttgcgccagttcggtgggcaatacgtcgacgcggatttttacctggccacgttcggtgaacttgatggcattgctgatcaggttcgacagcacctgcttgaagcgcagcgggtcgatcaggacttcggtgtcgtcctggtcgggtttgaactcaagggacaggctgagggttttctggcgcgccaggccgtcgaagacacgcaccaccgactcgatcacctcgcgcaggttgacccgttccggcgccaggctcaggcggccggactcgatacgtgcgatgtccaggatatcgccgatcagctccagcaggtccttggccgagttgtacgcgacttcgatggccgggcgatccaggtggccatggtcggcgcgtttgagggtcagctccagcatgccgatcaccgcgttcatcggcgtacgtatttcatggctcatggtcgcgaggaacgtgctcttggcccgattggcttcgtcggcgcgctctttggccgcgcggatctcatcgaacaattggcggcgctcgctgatgtcaatccagccaccgatgatcccttgcacctccccggtagaatcgcggtagggcaggatccagtgatagatcgtcagtttttccccgcggatatgcagggtgcggtccaggatcagcgggttaccttcggccattacccgctggtagtcggcatggtactgctccgcgtccgtctccagggtttcgctcatctgcagggcacttttgccgatcacatcctcgcgcttgacctcaaacacttgcaggtagctgtcgttgcaggtctgcagcaggcctttacgatcacgcacatagatggggtgcggggtttcattgaccagcgcgcgcatgaattcgaactgatcgttgagggcccgctcggccatcttgcggtgcttgatctgacggcgcatgtaggcgttccaggccagggagatcagcagtagcagcccggtgccgatgatgatacgggctatcagttggtggtagtcgcgccagtagctgtcggaggcggcggtgtagccccgccagcggctgttgatcacccccagttcatccggggcgatgctcaacagggccttgtcgaggatcgagctgagttcggtggcactgcgcgatgtggccagggcaaacatggccgggaaggtgccgatgctcgtactcatctgcagcttgtcctggaacacctgggacgacaggaagtagttggcgaccaccagggagttcaccgcgccttccacgtgtccctgggccaacagttccgaagccttgaaggtgtcgctggcttttaccagttggacctggggaaagtcgcgacgaaggatagcctccagagggttgcccggcgtgattgccaggcgtttgccggccatctgctccaggttagagggggcattgggttctttgcgtgtcagcaggacataggagttttccaggtagggccggctgaagttcagttgcgcctcccgctcggcgctgggcacgatggccccgataatgtcggccttgccggtgtccacctgctcgatcattgcattgacgtcgcgttcgcgctggatctcgaagcgcagcccggtgcgcaggcggaccaactccagcaggtcggcggtgatgccgcgaaagttgccgtcggcatcaaaaaaggtcaggggtgcgaaggtttcattcacaaccaccttgactaccggatggtctttcaaccagcgctcttcgcgttgggtcagttgcagtttctggtcggacagcaagatgtcgctgccggcgctccagcgcttggcgatcatttcccgttcgttcatgggcacggtggtcagaaccgcgtcaacaatactcaagagggtgcgctggtgttggggcatggcaaagctgaacccgtaggcttcgtgtttaccgaagttggccatgcggatgttcttcaggtagcccttgttgatcatgtaatgggtggaaatggtatcgccgaggaacacgtcagcctggtcgaacgccaccgcattcagggcattttgataagaggggtaggcacggatgattgcctgggggtacagcttttccacttcgtccaggggcaggtagtggtagaccagggccaggcgcatgccggccaggccatcgttcaggctgcgggtttcaccttcgcgggtgaccagcaccggttggtcgacggcatagggttcggacagcgtgaggttcgggttcgccgcctcgaagccgttggaggagcccagtagatcgatatccccggcttcaagcgcgcggatcgccgcttcacgggaaggatagcgcagtactttcactggcaaggccagcgccttggccaacaggccggcgtaatcagcggtaagtccttcgtagtcgcgaccgctggacgtgaggtcgaacggaggatagtcaggggccgcagtgcccaataccagttcgcgcttgttttgcagccattggcgctgggccttgttaaggtttgtttccagttgaacggagcctgcacggctcaacaaggtgaaatgttccgggcccgtttgatggttcgcgagcacggcggtgctgaagcacaaaccggcactcaatataatcagatagtcctttatacgcctgggcatccgctttctcacactagcgcgtttcgttttgccatctcgataagttctaccaaggatttggcttgaagtttttgcatcagcctctttttgtaagtgcttactgttttgttgctcaggaacataccttttgcaatttccttattggtgcggccttgtgcaaaaagttgcaaaaccataagttcgcggtcgttgacgttcttgaacagttcaagttcctgggagtcgcagccgtctgcaccactgctgttcagtgcctggctgggaaagtagttgtagccggacaacaccgcgcggatggcgctcagcaattcgctcaggtcgccttccttgcacacgtagccatcggcgcccgagcgcatgcagcgtgtggcgaacaaggtgggggactgagccgtcaggatcagggttttcatttgcgtgttcatggcgttgaaccggcagagcacttcgagcccgtcgagcttggggatgctgatatcgaggatgatgaggtcaggcaagcattcgcggaccatttgtatggcatcgcatccgttgtccgtttctcccaccactttgtaaccttcgtgttccaacaacattcggatggcaagccgtataaccgggtggtcatcgataataaaaactgagttcatgatcacattccgtgcaagtgcaaataaagcgggcacattagctcagaaggggaggcgggagcatgagctcaggggggagtagatataaaacaggaaagttcctacattaaaaaaggtaaaggcctacccgttgctcaggctgtgcgaagtgatatgccagcgcttgtgagatgaatgaattaaatcttgccgctatggaattagctggctcggtactgagctttttcttcggggcctgatgtttaaaatcctacatgtgtgacctgagtaatgggcagatcaaacgtgccagctcatctttgttgagcggttttgacaaatagccgagcaatggcaggccacggtccaccgcttggtctatcagggcggcgagttctgtcgcgggcagtccactcaggaggatggcagttgtggtaaagcgtcggcgactggcgatttcaatcagctcgagtccaggcaggtcgggcaggcattgatcgcacaggatgatgtcgaagggcatctcggcccgcgacattaaacagatagcctgttcggcgttctcggcgggggtcacccgtgcgaagccgaagcttctgagcaggcactgggtggcgaggagttgaaagggatgatcctccaccagcaggatacgaagcggataactgggcattggggggcacacggtgagtcaagcgtcgatggagggcgcgtaggaacagttcgcctgggtcgcccggagcgtgcgtgagtattcattgggtgcttgtgcgaattcgatcaggccgctctgttcccttcgtaggtcgattcctttcgggcaacaggcggcttgatcgtgctcgtcattgggggctggagcgcccggtcatttcccgggccatttcggtggcatagctgtcggtcatgccggcgatgaagtcgatcatgcgcaggaacgaggcgtgcaaaggccaatgggggttcggcgcgttgttacccagcaggtcgagaatgcgccgattcttgaacgacggcgtacgcccgccatgctgctccagggctgcaccgcaaaaggcgttcagcagaatttccaaggtggtgtaggcgccgatttcatgcaatgtcttgcgcttgtcctggaagatcttcttgcgtgccatgtccttggcgtccagcacgcaacgcttggccgggccgtgcatgtgctccaccaggtcgccgggcagggtgccggcgagcaaggcatcctgttgttcgacaaaggcccgcgcggccgcgttggtcaggtgttcgatagccttgccgcgcaggatcgccaacttgcgccgccgcgagtcctgcgcaccgagttgacgataggtctgcggcaggtcatcgcctaccaggtcgagcagcaacgactcgacctcggtgtattccagcaactccatttccaggccgtcttccaggtcgatcaaggcataacagatgtcatcggctgcctccatcaagtacaccagcggatgccgggcccagcgctgttcttcgagttgcggcaggccgagcttgtgggcgatctgctcgaggatcggcaattcactctggtaacagccgaacttgtgtttcttgtagcccagggagtcggcgtggcgggcggtccaagggtatttcaggtaagtgcctagggtggcgtaggtcaaccgcgtgccgccgtcgaactggtgatattcaagctgggtgagcacgcggaagccttgggcgttgccttcgaagttgaggaagtcattacgctcggcgctgctcatgtcatccagccaaccgcggcctgcggcctgctggaaccaatggcggatggcgtcttcgccggagtgcccgaacggcgggttgccgatgtcatgggccaggcaggccgattgcaccaccatgcccaggtcgctcgggtcgcaccagtcgggcagggcgctgcgcagggtttcgccgacgcgcatgccgagggagcggcccacgcagctgacttccagggagtgggtcaggcgcgtgtggatgtggtcgttgctggagaccgggtgcacttgggtcttgcggcccaggcggcgaaatgcgccggagaagataatacggtcatggtctttgtggaacgggctacggcccagttcttccgggctgtgcagcggtttacctagacgttcgcgagtcagcagggtgggccaatccaaggcgggtactctccgtgcggtgaatgaccctcccagcttcccggttcagcgcgggctgggcaagcgaaaatctacagcccggccgcgtcgatatcgattaacagcaaacgctgaccgttatcaaagaattgtccggcggtgaggcaatactggttggtggtcgcgtcgcggtaggtcgaggagagggtcagacggcgctcgtcccacccttcggccaacaggtgatagaagtacgggcgccacgaccagttgtggcccagataaaggctgtcggcctgccaggcgtcctggcgccactcgaagttgggcgtcagctgagtgccgtgtcggtcgcattggtagaagcgcagcagccaggggaaagccggcagttggggcaactggctcagcggcgcttgtgcctgagcccaggtttgcaggattttcatcagctcggccaattgctggcgcaattgcatgatgcgcccgcgttccgccagtttttgctggacgtaggccgtgcgcaactgggcaaaacgtggcacgaaggcgtcggcggcaaaccagtccaactgtgcctgggcaaacagatagccctgcacataccgcgagccgcactccagggcgaagctcaactgtgcttcggtttccacgccttcggcaatgatccagcagccggttttctcggccatctgtgccagcgcccgcaccacttcgctgctgggcccaccgcgggcggcttcctggaacaggcgcatgtccagcttgagaatgtccggttgcaatgccagcacccggtcgagttgggaatagccggcgccgaagtcatcgatggcgatacgcgcaccggcctcgcggtaacgcgcgaccacgtcggccaggcgttggatgtcgccacccagttcggtgatctcgaacacgatccgctgcgggtcgacaccatggctatgaatctgtttcaggctcggcagggcttggcccggacgcaggcggttgatccagcgcggtgagatgttcaggctcaggaaccagtcggcgggcgcttcatgcaggcggctcagggcattgtcgcgaatctgccggtcgagacggcgcaaggtcacgcccggggtgcgcgggtcggcgaacagcggccccaccgattgcaggcgcccgtcggcctggcgcagtcggccgagggcctcgacgccggcgatgcggccggtggcggtatcgataaacggctggaagcaggcgagcggttgcccgtcgatcacggggcctccttaagcgaggtggctgaaaaaaaggcccggccctcgaaaacgagggtcgggccgattctgttagcaagaatgcagccagccaggctcaacttttgcgcgaagtgccctgcatggccaatttgatcagcgggatcaagccggcaccgagacgcaccaggcgtgtcaggctgctgataccgccgcccttggcgcctttgccggtaaaaaagcccatcagcgtcaccgcagccacgccccacagcggcgcgtgcttgatgcccaggctgtcttgccagtgactgcccaggttgcgcaccttgttcaacggcagcatcaattgctgggactcgtggcggatttcctgacggtgcatttccatgcgcaggcggatcaacgccttgcgcatttcccgccgtgacgtgttttttggcatttcagtcaggctcatggcagcaagcgctcccgatcattggccagttcttcgagggtggcatggaacggcgtggattcatcgaacaccgccgctttcaagcgcaccccgcaaaaggctgcggccaggctgtagaacacgcagaggcagatgatgccggtcaggcggtagccggtgtcccacaccaggatcatcaccagcgtcgacagccccaccagcaacagcaatgcaaacaccaatgccaggccggcaaacagcagcaggctgacggtgcgggccttctgttcctgcaattcgatgccaaacaattcgacgtggctgtgcagcaagcccagcacggccgcgcccagacgccttgaggtagtgcccgtggacgagccagtttcgccgatagacatgatttagcgccttgtggccagcaggccgatcagaaagcccacgccggcggcaatgcccaccgactgccaagggttggcctgcacgtaatcttcagtcgcggtgacggccgcctggccgcgttcgcgcagcgagtcttcggtcagttgcagggtttctcgggccttgagcaggctttcgtgaatcttgctgcgcagctcatcggcctggtcacctgccagcaccttggtgtcatccagcaacttttcggtgtcgctgaccagggtttgaaaatccgccatcagtatttcttgcgcagtctttgcagttcttctggccatggttatctccgtgatgggctgttttgtacgtagtggtttcgagtcaccggcgtcggtgaaggttcagtgcaattgtgtggtacagcttttgctttgccttggtgcgcaggccttgctgcctgcgctgaatccgggcggtcgggcaggaagccttgaaaaaccttaccctaaataactgaaactcgcggaaaaaccctgtcggcaacgacctgatgcgttgatcgctgcgctaaatcggttcacgccctctgaagaggggtggggccggcggtgccaatttagtgcgcgcaacccaggtttgaaccgctttggtgctttttgcctttactgcaggcctgccaacctccatggaaaatgtgcaaagtgcggtggacaccctgatccacagctccaataccctgtttatcctgatcggcgcggtcatggtcctggccatgcacgccggcttcgcgttcctcgaagtcggcacggtgcgccagaagaaccaggtcaacgccttgtcgaagatcctcagcgacttcgccatctccacactggcctatttctttataggctattggatctcctacggggtgagcttcatgcaaccggcggcggtgatcagcgccgaccatggctacggcctggtgaagttcttcttcctgctgacctttgcggcggcgatcccggcgatcatttccggggggattgccgagcgggcacggtttgcgccgcagctctgcgcgaccgcgttgatcgtggcgtttatctacccgtttttcgagggcatggtgtggaacggcaatttcggcctgcaggcctggttgctcgcgacgttcggcgccagcttccatgatttcgccggctccgtggtggtccacgccatgggcggctggctggcgctggcggcggtgttgctgcttggcccgcgcaacgggcgctaccgcgaagggcgcctggtggcgttcgcgccgtcgagcattccgttcctggcattggggtcgtggatcctgattgtcggttggtttggcttcaacgtgatgagtgcgcaaacgttgaatggcgtcagtggcctggtggcggtcaactcgctgatggccatggttggcggcaccgtcgcagccttgatcattggccgcaacgatccgggtttcctgcataacggcccgctggccgggctggtggccatttgtgcgggttccgacttgatgcacccggtgggcgcactggtcacaggggccgtcgccggtggtttgtttgtgtggttctttatcgccgcccaggatcgctggaagatcgacgacgtgttgggcgtgtggccgttgcatggcctgtgcggcgtgtggggcggcattgcctgcggcatcttcggccagacggcgctgggtggactgggcggtgtcagcctggtcagccagttgatcggcaccgcccttggcgtgttggtcgcgttggccggcggcctgctggtgtacggcgtgatcaagcgcgtgcatgggctgcgcctgagccaggaagaggagtattacggcgcggatctgtcgatccataagatcggcgcggtcagtcaggattgatcggctcgtctgcctggcgataaaaaccgtgcagcaggcggtagcggttctgtcgtacttcatcgacccgcgcctgcacctgttggtccggcaggcccaatagaatcagggcgtgggaggcaagcatcaggcttgactccaatagttcgggcaccacttcgctggcgcctgcggccttcagctcagccagttggctgtcgtcgcgggtgcgtaccaggatcggcacttcggtgttgatccggcgtgcttccttcaacaccaccagcgcgacatcggtgttgtctacggcaatcaccaccaaccgtgcgcgctccaggccgaccgcactgagcaatgcgccacgccggcaatcaccgtagtgcacgctgctgtcttcggtggcggcttcctgtacccgttccgggtcgtcatccagagcgatgaatgcctgttgttccttgcgcagaaagcgtccgatggattggccgacgcgaccatagccgcagatcaccgcgtggccgtgcagctcggcgttgagcgcggtgatggcttccagttgcacttgctggttgggcttgcggtgcaggcgcagagcaatgcccggcgcggcacgcagcagcaggggtgtcagcagcatcgagcagaaggtggcggcgagcagcaagccgttgaattcatccgggatcagtcggctctgctgcatctgtgccatcaacgcaaagcagaactcgccgccctgggccagtgccaggccgctgcgccaggcggtttcgctgtcgctgccgcgcagcttgaccagcgcggcgaccacacagcccttgaccagcatcagggtgagggtcagggcgaggatcaacaggctgtggctgacgaacagttgcaggtcgatgagcatgccgatactgacgaaaaacagccccagcaggatgtcgcgaaacggacggatatctgcctcgatctgatggcggtagtggctttctcccaacagcatgccggccaggaacgcgccgagggcaggggagagccccagcaggtgcgtgagccaggcggtcagcaacacaatcaccagcgccagcagtacaaacagctcggccgagtgcgaggcggccacctcatgaaacaagcgcggcagcagccagcgactggcaagcagcaggccgacaaacaacaccacggtcttgcccagggtcagtggcagcgcccagtaccaggcttgttcgccggtgccggcaaacaccggcaccagggtcagcaacagcaccgccaccacgtcctggaacagcaacacgccaatcgcgttctggccatggctgctgaagatttcaccgaggctggtcaactccttgctgacgatggccgtggatgacagcgccagccctgcgcccagtaacaacgcgatacccggcgccacccccaggatcatcaacaagatgcccagcagtgccccgcagcccaacacctgcagactgcccaggccgaacaccacgcggcgcagggcgagcatcttggtcagggaaaattccaggcccagggagaacagcaggaacaccacgcccagttcggcgaggtcgggcagctcctcgctgtcattcacccagtccagcgcggtaggccccacggccaggccgacgcacaggtagcccagcacgggcggcagttgcagccggcgaaacagcgcaatcaccaccagggatgaggccagaatgatcagcaggttggcaaacacacgcatctccattgcaagggggcaggcaaaaagccgcgagaatcgctgaaacagttataggccatggtgacctgggtcagggttttcaggggctggtttctcgccacaggttttcgtcaggcttagaatgttggcctactttctgatcaggtccattcgtcatgcttcctgaatgccagttgttcggcaccctgggttgccatctatgtgaaattgctgaagccgaaatcatgccgctcgtcgaacacgggttgctggtggagctggtggatatcgccgaccccgacgacctgaccgaagcctacggcctgcggattccggtactccgccgggtggacacgggggcggaactggattggccatttgactcacaacaggtcgtggccttccttcgttgagtttatgcgatggcaggtttccaaatattacgttactgtatgtttgtacagcgattgaatagagggagcgcccgtggtgaatgttgaacaactgaaaagcagcgtcaatcgcatgtctgccgacgtcgtgcgcgacgcggtgaacgagctgcgcctcgatggcctggtcacggaaggcaagacgccttttaacaaggtgcatttcaatacctgctttgccgagatcgaggcgctgttccagcgcgccggttaccacaagcagctggatgtggtgggttaccagggcttgttgtacgcgttgtacgatccaggccgctgggaagccgtggacgtgttgcgctggctcaaggaattcaccgaggccgcgagtgcctcgccgatcctgcgggcggagttggccaaggcctgaatccgccctaggctcaatcccgcccgatgcgggataatgcccgccggttttcccaggctttgagcatttcatgtcgacttccgtttttatcgcctccgagcgccaagccagcaccctgtatttgccgcccggtccttgggcgacggtgctcgattgcctgtgcgagcacttcccggcgatcggccgcgaacagtggctcgaccgcatcgcccgtggccgggtgctggacatcgacggcagccccatcagcctggacctggcctacaaggaaggcctgtgcatctattacttccgcgaagtgccgaacgagaaagtcatcccggtgcaggaaaccatcctgtacgccgatgagcacctggtggtcgctgacaaaccgcacttcctgcccgtgacccccgccggtgaatacgtcgagcaaaccctgctgcgccgcttgattcgccgcctggacaacccgtcgctggtgcccttgcatcgcatcgaccggcacacggcggggctggtgttgttctcggcccacccggccagccgctcggcatatcagcaattgtttcccacccgccagatcgacaagttctacgaagccatcgctccggccctgccgaacttgacgttccccctggtgcataaaagccgcctggtcgatggcgagccgttctttcgcatgcaggaagggcctggcgcgagtaacaccgaaacggcggtggaagtgcgcgaaaagaacggcgatctatggcgctatggcctgtttcccgtcaccggcaagaagcaccagttgcgtgtgcacatgagtgccctcggcgcgagtatttgtaacgacccgttctaccctgacgtgatcaaggacgcggtagacgactacgccaacccgctgaaactgctggcccagggggtgcggtttatcgacccggttacgggcgaagaacgcagtttccgcagccggatcaccctcgactggtaaccgccagaaacgacaaggcccgcgcgaggcgggccttggattaaccggatagctggggctttctgatactgcgtggtgtcccgttcagggcggcttcgccacccagcgcggggcaagcccgctcactacaggtctttgacggtgcgaacctgatccttattgatgcgggtgcgcttgccgtcaagttgttcgaattcgtagaaacccgaatcttcattgtatttcggggtgtcgacggcctggatttcgcgaccgtcattcagggtgatcactgtcggcgaggcgcaaccggcgagggtggcgaggcccagtgcaagcatgagagcggcgatggtccgttgagtcatgagtttgtctccgagagaattcttttaaatagctgaccttgtgacgcgcagggcatcgacaaagttcctgatgcgaggttcattctgacacgcccgagcgcgtctgtaacagctccggcgtattaaggttggccaggcgcgggtcatccgccgggcactcaaggcccatgccgcccagttgcaggaagagcttgcgcgggctgcgctcaccggcgtgccaggcgcgctccaccgcgtcccgcagggcggaggggaggatgcagatcagcggctcccagaactcaccatggcgcaccattaccggcagcagcgggttgcgccgtgcagtctcacacaggtcagcgagcaaccctgcgtcgatatgcggcacatcgcacggcagtatcagcaggtgcgcgtggcgcgcggcggcgagtcccgcacggatgccggcgagggggccgggaaagtccgggctgtcgtcgttgaccaattggtcggcatacgcggcgtagtgttgcgggttgcggttgcaggagatgatcaagtcatccgtcagcggccgcaccaggcgctgcaaatgggcgatcaggggctggccgtgccattccagcaggcctttgtcctggccgcccatgcgctggccacgcccaccggacagcagcaagaccgaacagggcaggggcgatgaatcgataggcatgacggttccgcagcggcagcaaaaggggggcctgtgatataacatcgggctgttccttcgacaaccggaccgtgccatgaaagccaaggcagatgcgcccttcgtacccctgaacatcgctgtattgactgtcagcgacacccgcaccctcgacactgatacctccggccaggtcttcgtcgaccgcctcaccgctgctggccacaacctggccgagcgcgtgctgctcaaggacgacctctacaagatccgcgcccaggtcgcccactggatcgccgaagacgtggtgcaagtggtgctgatcaccggcggcaccggctttaccggccgtgacagcacccccgaagccgtgagctgcctgctggacaagcaggtcgatggttttggcgaactgttccgccagatctccgtggcggacatcggcacctctaccgtgcagtcccgcgccctggccggcctggccaatggcaccctggtgtgctgcctgccgggttccaccaatgcggtgcgtaccggttgggacggcatcctcgccgagcaactggacaaccgtcaccgcccgtgcaacttcgtcccgcacctgaaacaggccgagccttgtgaatcccgtgggtaagcccggcaagaccggcgccctgatgccggtggaagacgcgttggcgcaactgctgaccatggccgaagccgcaccgatccgtgagcagcaaaccttgcccctggcggactgcgacgggcgggtattggcccaggacctggtctccaccctcgacctgccgccctggccgaacagcgccatggacggctacgccgtgcgtctgtcggactggatcggcgaacctatggtggtcagccagcgcatcttcgcaggccaggcgccacagccgttggctgccggcacctgcgcgcgcattttcaccggagcaccggtgcctgaaggcgccgactgcgtggaaatgcaggaaaacgccgtggtccacgccgatgagcgcctgagcttcaccgagccgctgcacctcgaccagaacatccgcccacagggccaggaaaccacggctggcgagttggttttgtcggccggcacgcgcctgggcccgatcgaactcgggcttgccgcctccctggggcgcgactgcctggaggtggtgcgccgcccacgtgtggcggtgctgtccaccggtgatgaactgatcgagccgggtttgccactggggccgggccagatctacaacagcaatcggcgcgtgctgtgctcgtggcttgcgcgcctgggttgtgaagtgatcgatgccggcatcctgcccgacgacctggagcaaacccgcacacgcctgggcgacctgggcagcgtcgacctgatcctgtcgaccggcggtgtgtcggtgggcgaggcggatttccttggcatcgccctgcgtgaagagggcgagttggccctgtggaaactggcgatcaaaccgggcaagccgctgaccttcgggcacttccgtggcgtgccggtgatcggcttgccaggcaacccggcgtcgacgctggtgacgttcgcactattggcgcgcccttatctgctgcgccgccaaggtgtgcaagaggtggagccactgcgtttcgaggtgccggtgggattcacctggccaaaaccgggtaaccgccgtgaatacctgcgtgggcgcatcgagcagggcaaggcgatcatctaccgcaaccagagctccggcgtgctgcgcagtgcggcgtgggcggaggggtttgtggaggtgttggaaggcacgacgctggcgatcggcgatcgggtcaacttcatcccgctcagtgaagtcctgaactgacccaatccaaatgtgggagggggcttgcccccgatggcggtgtatcagtcaacttaagtgtgactgacactctgaagtgcgccccaaaagttggacacccatccaactcctggggctttttcatgagcaagtacacgacgcaattcaagctttccgccattactgcctttcttgagcgaggtcgcggctttcgtcgcatcgccgctcaatttcaaatggaccccaccctgcttcgccgttgggtggaggcttaccggttgcacggcgagaccagtctgagcagtactggtggacgctacagtgctttgtttaagttctccgtcctacagcgcatgtggcgtgactccctttccctgcgccgcgcagcagcgcttttcaatctgggtgactctacccaagtgggaagatggcagcagcagtattacagtggcggcattgaagccctggccccagggaaaaaaggacggaccaccgcgatgcccaagccacctgcgaaacctcgtaaacctgccggcacactcaccaaagaggaacttgcacataaagccctgcttgatgagcttcaatacttgcgcatggagaacgcctacctaaaaaagcttggggagttaggcgaggcagtgatgaggcgagagaaagaagcgaagaaaaagctcgaatagtcaccgaactgaggcaagactttcccttgagtgacttgctcaaactgctgggccttgcgcgaagtacgtactactaccaactcaaaatcatggacactgcagaccgattttcctcggtaaaagcctctatccagagccttcaggaagagcatgaagggcgcttgggttaccgtcgtatgactttagaactacgtaaagaaaggccgccgatcaacggcaaaacggtacggcgactgatgggagtgctgggtctgaaatgcacagtacgaccgaagaaatacagagcgtataaagggccgatgggagaggtctcgccaaataaattggctcgccagttcgaggctgaacacccgaatcaaaaatgggtgacggatatcaccgagttcaaagtagctggaaaaaagctgtatctgtctccaattttagacttgtacaacggagagatcgtggcttatcagacagccatgcgccctcaatacgctttggttggcgacatgctggaccaagcgtttaagcgcttgcccgagggagcaaagccaatgctgcactcggatcaaggctggcattatcgatactcaaagtaccgggaacgactggaaagagagggcgtggaacagagcatgtcacgccgaggaaactgctatgacaatgccacaatggagagtttctttggcacgttgaagtcagagttttattatcgggaacgcttcgatagcgtggcccagttgcaagccggactcgataaatacatccattactacaatcataaacgaatcaaaaccaagcttggcggactgagccctgtagagtacagagcccggtccgctaaggcctagacaataactgtccagcttttggggcgcacttcactctgctatcgggggcaagccccctcccacatatgattcttcatatgcctcagtaatcgtcgccgcgctcggtgatgtcgcgctccaccggccccgcattcgggtcataccccaccgggaacttgcccttcagcgtccacgcaaacgcaatgatctcggcaatcgtgcggtacagctcctcgggaatactgtcgcccagttccatccgcgccagcagcttgaccagctcggcgttttcgtagatcggtacttcgtgttcccgcgccagcttgaggatcgcttcggccagggcgtcgtcgcccttggccgtcagggtgggggcctgctggccgtcgtacttgagggcaatcgcctggcgcggcggtatcgggttcttcatgcggtttcatccacccagcgttgttccagcccggtttttggcccgcgcggcggggtgccgaggtggcaatcgaggtcgccgacgttgatgcccgaggtcaccaggcgttcgcgcaggttgcccaagtggctttcgatcaggctggcggtgaagggccgcgaggcccacagctggctggacagtttgccctggctcagttgcgcctggacctgcaatggccccagcggctccatgtcgaaggccagctcgacgcgccagagcatctgcttggcgtccttcttgtccttgcgttcgggctggtccttgtccggcgccggttcctcgcgctggaacttgacctgcaacggcactatgtcttgcaaggtgcgcatggggatttccagctgccaggtggtttgcaagcggccgtcggcggtggtgccggtctgttccaggctcgacagctgatggctttgcagccgtgaaattgcgccggcggccaggcgcagcaggttttccaggtcgccttcaccttccagtttcgccatcagccgttcgggcagcgggaagccggcgggtagttgccgggcgctgacctggccaagtgtgttcagtgggctgcgcacgaagttgggcagcacctgggccagggtgttggcggcgaggatcgcggtcatgctggtgctggcgggcagggcgggcagcaagtccgcgaccaggcgcagcaacgcgcctttcatgtccagcggcgggatttgcgggttctgcccggcgagcagcttggcttcaagaaaggcgccgctgttctggatgacttgcgccagtaccttggggttgctgacttgcgccaggtccggcaaagcagccaacaggcgctcggcggcggagcgcagatcggcggaggtgctgtcgccgcgaggcaggttctgcagggcggtgaagacagcatccaacgagccctggcgactttgctgggtcgacagttgctggctgaccgccagttgatccttgagcccgctcaacggcacaaagctcagggtctgcgcgttttgcaccacggcgctgagcaggctgccgacgcgcaggggctgagggctttccacggtcagggtcgcgcccgccagggcgttgttgagcacagtgaccagcgagcggtagatcgccggctgcgcggtgccctggggcagcatctgggtagtcagcaccttggcctgcaacagcgtgcccaccggtatctggttggtgtcaatgcgggtgagggcggcgacattggcgctcaaggcctgctgcaggctgagggtcaggttacccgcaggcgtctggctcaccgccacattgctgcccagcggcagcggctgcgggctgctggcctgcaccagggtctggcggccgccttccagggtcaacttgagcagcaactggaaggcctcgccgccttgtttcagggcgatgacttcggcgtttgcggttttcccggggtcgatcaggccgatctgcggctccagcagtttcagcaactcaccggctgcgggcgcagggccaggcccggctgcaggggcgggtgcaagcgtaggaaggttgatctcaccggtcatcgcgcgcgtcgtctctggggaaattgccctctttagagtagggcatcacatgtataatgccgcccgtctgcaaagagagcggtaaaaacctcacaactatttgatccagctctctaaaatcggtcgccaaagccgttattgtgcatttctctttaacggccgctgcaccgccgacttgaaccgtaaaggcccgcgatcttttgaccagccctcttcttgaagccgtagcgcttgcctgtgaacgcgacctgcgcctgctgttcgagcacctcgaactgcggctgacgggcggcgacatggtgcagatcagcggccccaacggcagcggcaagaccagtttgctgcgcctgttggccgggctgatgcagccgaccgccggtgaagttcgacttaacggcaagcccctcaacgaacaacgcagcgaacttgcccgcaacctggtgtggatcggccacgccgccggtatcaaagacgtgctcaccgctgaagaaaacctcagctggctcagcgccctgcatcatcccgcttcccgcgaggccatctggcaggccctggccgctgtcggcctcaagggtttcgaagacgttccctgccacaccttgtccgctggccaacagcgccgcgtggccctggcgcgtttgtatctgccggggccgccgctgtggatcctcgacgaacccttcaccgcccttgataaacaaggcgtcgcccagttggaagagcacctggcccaacattgcgagcagggcggtctggtggttctcaccactcatcacaccctcaatcgcgtgcccgccggttatcgtgacttggacctgggccggtggtcggcatgagcgtcttcgccctgttggtcgcccgcgaagcgcggctgctctgccgtcgtccggccgaactggccaacccgctggtgttctttgcgattgtcattgcgctgttcccgttggcggttggccccgagactaaactgttgcaaaccttgtccccgggactggtgtgggtggccgcgcttttatcggtcctgctctcgctggacgggctgtttcgcagtgatttcgaagacggctccctcgaacagtgggtcctttcgccgcaccccctgccacttctggtactggccaaggtactggcacactgggctttttccggcctcgcgctagtcttgctctcgccgctgctggcaatgatgctcgggttgcccaccgaatgcctgccgatcctgctgctgagcctgttgctcggtacgccggtgctcagcctgttgggcgcagtaggcgcggcgttgaccgtgggtttgaagcggggcggcctgttgctggccctgttgattctgcctttgtacatcccggtattgatcctgggcagcggtgccttgcaagccgcgctcatgggcatgccggcgaccggttacctgttgtggctgggtagcctgaccgccctggcggtcaccctgacaccctttgctatagcggccggcctgaagatcagcgtcggcgaataatgaggtctgactaagtgttatgtcttagtcagtaaagaccctaagcttttcgcaacgacgaaaagcaaccgtgatggaaacagcaatgaactggacctggtttcacaagctcggctcgcccaaatggttctatggcatcagcggcaagctgttgccgtggttgagcgtcgccgccgtgttgctgatcggcatcggcctggtctggggcctggccttcgcgccgccggactaccagcaaggcaacagctttcgcatcatttatatccacgtacccgccgccatgctggcccagtcctgctacgtgatgctggcggtgtgcggcgttgtcggcctggtgtggaagatgaagctcgccgacgtggccctgcaatgcgccgcgcccatcggcgcctggatgaccgccgtggcgctggtcaccggcgcgatctggggcaagcccacctggggctcgtggtgggtgtgggatgcgcgactaacgtccatgttgatcctgctgttcctgtacttcggtctgattgccctgggcaacgcgatcagcaatcgtgacagcgccgccaaggcctgcgcggtgctggcgattgtcggcgtgatcaacatcccgatcatcaaatactcggtggagtggtggaacaccctgcaccagggcgccaccttcaccctcaccgaaaagccggcgatgcccgtggagatgtgggcgccgctgctgctgatggtgctggggttctactgtttcttcggcgccgtgctgctgctgcgcatgcgcctcgaagtgctcaagcgtgaagcccgcaccagttgggtcaaggccgaagtgcaaagcagcctgggagcgcgtggatgagttttgcttctttcagcgagtttctcgccatgggccatcacggcctgtacgtctggaccgcctatggcatctgcctggcggtgctggccctcaacgtcgccgcgccgatcctggcccgcaagcgttacctgcaacaagaggcgcgtcgtctgcgccgggagaccgaaaagtgaatccgctgcgtagaaagcgtctgttgatcatccttgccatcctggtgggcgtcggtattgccgtgggcctggccttgagcgccttgcaacagaacatcaacctgttctacaccccgacccagatcgccaacggcgaagcgccggtggacacgcggattcgcgccggcgggatggtggagaagggctcgctgaagcgctctgctgactccctcgacgtgaccttcgtggtcaccgacttcaacaaagccgtgaccatcacctaccgcggcatcctcccggacctgttccgcgaaggccagggcatcgtcgccctgggcaaactcaacgccgacggcgtggtagtggccgatgaagtgctggccaagcacgatgaaaaatacatgccgccggaggtcaccaaggccctgaaagacagcggccaatccgcgccaacgcctgccaaggagggctaagccatgacgtccgcactgtttattccggagctgggccagctggcgatgatcctcgccctgtgctttgccatcgtgcaggccgtggtgccgttgctcggtgcctggcgtggtgaccgtttgtggatgagcctggcgcagccggcggcctggggccagtttgctttcctgctgttcgccttcggctgcctgacctacgcgttcatgaccgacgacttttccgtcgcttatgtggccaataactccaatggcgccttgccctggtacttcaagttcagcgccgtgtggggtgcccacgagggttcgctgctgttgtgggcgttgattctcggcggctggacctttgccgtgtcggtgttctcgcgccaattgccgcaagtgatgctggcgcgggtgctggcggtgatgggcatgatcagcatcggcttcctgctgttcctgatcatgacctccaacccgttcagccgcatcctgccgcagattccggcggacgggcatgacctcaacccgttgctgcaagacatcggcctgatcgtgcacccgccgatgctctacatgggctacgtgggtttctcggtggccttcgcctttgccatcgccgccttgcttggcgggcgtcttgatgcggcctgggcgcgttggtcgcggccgtggaccatcgtcgcctgggcgttcctcggtattggtatcacgctgggctcgtggtgggcctattacgaactcggctggggcggctggtggttctgggacccggtggaaaacgcctccttcatgccctggctggtcggcactgcgctgattcactcgctggctgtcaccgagaagcgtggcgtgttcaagagctggaccgtgctgctggccatcgcggcattctccctcagcctgctcggcaccttcctcgtgcgttcgggtgtgctgacgtcggtgcatgcgtttgcgtccgacccggagcgcggcgtattcatcctgatcttcctgctgttcgtggtcggtggctccctgaccctgttcgccctgcgcgccccggtggtcaagagccaggtcggctttaacctgtggtcgcgggaaaccctgctgctgggcaataacctggtgctggtggtggccgcgtcgatgatcctgctcggcaccttgtatccgctggtgctggatgcgttgagcggcgccaagctgtccgtgggcccgccgtacttcaacgcgttgtttatcccattgatgggcctgttgatggtggtgatggcggtcggcgtgctggtgcgctggaaagacaccccagtcaaatggctggccggcatgctgatgccggtgctgctgggcagtgtggccctggcggtgatcgccgggtttgcctacggcgacttcaactgggcggtgctcgccactttcctgctcgccgcctgggtgttgctggccggcgtgcgcgatatcttcgacaaaacccgccacaaaggcctgatcaaaggcctgccgaccctgacccgcagctactggggcatgcaaatcgcccatatcggcatcgccgtgtgcgccctcggtgtggtgctgtccagccagaacagtgccgaacgcgacctgcgcctggcgccgggtgagtccatggacctggccggttaccacttcatcttcgaaggcgccaagcacttcgaagggccgaacttcacgtcagacaaaggcaccgttcgtgtcgtgcgcaacggcaaggaaatcgccgtgctgcatccggaaaaacgcctgtacaccgtgcagagttcgatgatgaccgaagccgggatcgatgccggtttcactcgtgatctttacgtcgcactgggtgaaccgctgggcgacggggcgtgggccgtgcgggtgcatgtgaagccgtttgtgcgctggatctggttcggcggcttgctcaccggctttggtggtttgctggccgcgctggaccggcgttatcgggtcaaggtcaagagccgggtgcgtgaagccctcggcctgcaaggagcggcggcatgaagcgttggttgatggtagtaccgctggcgatgttcctggtggtggcggtgtttctgtatcgcgggctgtacctggacccggccgagttgccttcggcgatgatcggcaaaccgtttccggcattcagcctgccgaccgtgcagggcgacaagaccctgacccaggccgacctgctcggcaaaccggcgctggtcaacgtgtggggcacctggtgcatctcctgccgcgttgaacacccggtgctcaacaagctggccgagaagggcgtggtgatctatggcatcaactacaaggacgacaacgcagccgcgttgaaatggctggcggaattccacaacccgtaccagctggatatccgcgatgaagacggcaacctcggtttgaacctgggcgtgtacggcgccccggaaaccttcttcatcgatgccaagggcgtaatccgcgacaagtacgtcggcgtgatcgacgaagtggtctggcgcgagcagctcgccgccaagtaccaggccctggtcgatgaggccaagccatgaagcgtctgttagccgctgccgttttagcgttgggcctggcaagcgtggcccacgccgccatcgacacctacgaatttgccaacgacgccgagcgcgagcgtttccgcgacctgaccaaggaactgcgctgccccaagtgccagaaccaggatatcgccgactccaacgcaccgatcgccgccgacctgcgcaaggaaatcttccgcatgctgggggagggcaaggacaaccagcagatcatcgacttcatggtcgaccgctacggagatttcgtgcgctacaaaccggcgctcaccggcaagaccgcgctgctctggttcggccctgccggactgttgctggccggcgttgtcgtaatggccgtgatcgtgcgccgccgccgcgccgcgccaaccgatggttccgacgcgctgtcccctgatgagcgtaaacgcctcgaccaattgctggacaccaagactgatgattgatttctggctcgcagccggcctgctgcttctgattgccctgagtttcctgttgatccctgtcctgcgcgaccgccgtgcccagcgtgaagaggaccgcaccgcgctgaacgtggcgctgtaccaggaacgcgttgccgaactgcaagtgcagcaggacgaaggcgtactgaatcccgcgcaactcgacaccggccgcgccgaagctgcgcgcgaattgctggccgacaccgaaggcgtggaaaaaccccgcgaatcgcgcctgggcaagccgctgccgttgttggcggcgtttctagtgccggtcctcggcgttgccctgtacctgcattacggggccagcgacaaggtcgaactgacccgtgagttctcccagccgccggtgtccatggaagacatgacccgtcgcctggaacgcgccgccgctgcccagccggactctgcggagggcctgtatttcctcggtcgcgcttacatggcccaagaccgttctgccgatgccgccaaggtctttgaacgcaccgtggccctggccggccgccagccggaattgcttggccagtgggcccaggcgcagtacttcgccgacaacaaaaagtggtcgcccaaggtccaggcgctgaccgacgaagcgttgaagctcgacccgaaggaagtgaccagcctgggcctgctgggtatcgccgcctttgaaggtcagcgctatcaagaggcgatcgactactggaatcgattgctggcccaactgccaccggacgacaactcccgtgcggcgttgcaaggtggcatagatcgcgctgctgagaagctgaaagaaagcggcggtaccgtcgcccctcaaaaagccgcgatgaaggttcgggtagatctgagcgccgacgtgaaggccaaagccctgcccactgacagcgtgttcatctttgcccgtgcggtctccggcccaccggcgccattggcggccaaacgcgtcacggttgccgaactgccgatcaccgttgaactgggcgatgccgacgcaatgatgccgcagttgaaactgtccaacttccccgaagtccaactggttgcgcgcatatcccgggccggtcagccgaccactggcgagtggatcggccgcagccaccccttggccagcagcaccactgccttgcagcagctgaccattgacagtccggaccagtaatttcgaggaaacgcttatgaccgcactcgcccgaatcaccttgctcagccttgtattgggcctgagcgcatgtgcggtccaccgcccacctcctgcacccaccgggccgaccatcccgccgtccccgtcgacccagccgagcaccaaaccgtcgggcccggtgaccccgccgccgaagccggtgccgaccaaatcgccgacgttcgcgccgcccccaggtgccgccagccattgggacggcaagatgcaggtgtatgtgctggacgaccagcccgacaccttctaccgccagcgtacgtattaccgctggagcaacggctggagccgctcgatcagcccgaacgggccatgggaagacaccgacgtgcacggtgtgccgccggggttgagcaagcagtacgcgcaatgaaaaaaggcgacctattacaggtcgccttttttgcgctttaaaatccgctctctcaaccaccggagatcaaaggtgggagggggcttgcccccgatggcaatggggcattcagcccatcactgactgatccactgccatcaggccaccggacactcccgattcagcgcttcatccaccaacaactgcgcaatctcgatcatctgcaccaccgccaacacctgcttgcggcccgagccatccaagtgctcggcacagtcgtaggcacacacagtcgccgattccagcatctcgctggcattgctcaaggccgcttcggtgctgaggccggggcggacggtgaagatgaggtggggtggggtttgtggtgtgtcatccgaggtggatggcgggggatttggagtaacttttttcatgcagtaaatctccattcagttggagctcaccccatccgcgaccaagcagaagggtggcgagctgtacgcaggttggtcgaccagggaatggaaacccggcagggcctaggccctcccacgcacagctcgccataacgcgagcacaataatgccgcttgcgcggccctgtgcgccattctaatccaggcgaccaagcctgatcgctgatgagcagcgattgcgagaggctaatggtgcgttatagcaaccgcaaccgacagagaaggtaggaaaaatcgcatatgttgtggtgagcagggctgttgtggcgagcaggcttgccctgcgttgggctgcgaagcggccccaaaacctggcgacgggttctgtctgaaataacgcggtggtttcatcagggctgctgcgcagcccaacgcggggcaagcccgctcgccacagggttgatctgagtttcggtcaagtccaacctttcacaaaaccttcatccaaccgcccccctccagtcatgtgcaagtcatagggctgacacctcccgcgcctactgtcgtttgaactcaaccgcagccatcccaggctgttcaaacaagacagagaagcccatgaatcacgctatccatgtcgatcacttgaacaagacctttgcgaagaaatccgccttggtcgacctcgaactcaccattgccccgggtgagatggtcgcgctgattggcgcctccggttccggtaagtccaccttgttgcgccacctggcgggcctggcctgttgcgacaaaagcaacggcggcagcgtcaaggtgttgggccgggaagtgcaggccagtgggcgcttgaacggcaaggtgcggcggttgcgcgcggacatcggctatatcttccagcagttcaacctggtcaatcgcctgagtgtgctcgacaacgtgctgctcggttgcctgggccgcatgccgcgctggcgtggcagcctcggcttgttcaatgccgaagaaaaagcgtttgccctggagtcgctggctcgcgtcggcctggccgatctggcggcgcaacgggcctcgaccttgtccggcggccagcagcagcgcgtagcgattgcccgtgcattgacccagcgcgccgaggtaatcctcgccgacgaacccatcgcctccctcgacccggagtcggcgcgcaaggtcatggagatcctcgccgacatcaaccgccgcgacggcaagaccgtggtggtgaccctgcatcaagtcgattacgccatgcgttattgcccgcgtgccgtggccctcaaaggcgggcgcattcatttcgacgggcagggcagtgcgatgagcagccagttcctcaacgatttgtacggtgccgacgtcgacaccagcctgatgttttccgaccagacccgccacgccaccgccacccctcggctggccttggcgcgcgcttgaaaccttactcacgacccacaggaagcctttccatgttgaaccgtatcggccatgtgtttctgtctgccgtattgctggccagtgtcgcgctgggcaacgcccacgccgctgacaaggtgatcaacttcggcatcatgtccaccgagtcttcgcagaacctcaagagcatctggcagccattcctggatgacatgcacaagaagaccggcctgaccatcaacgccaccttcgcctccgactacgccggcctgatccagggcatgcgcttcaacaaggtcgacgtggcctggctcggcaacaaggccgcgatggaagcggtggaccgttccaacggcgagatcttcgcccagaccgccgccgccaacggtgccgccggttactggagcgtgttgatcgtgcgcaaagacagcccgatcaacaacgtcgacgacatgctcaagaacgccaagaacctgaccttcggcaacggtgacccgaactccacctcgggctacctggtgccgggctactacgtgttcgccaagaacaacgtggatgccgccaccgcgttcaaacgcacgctcaactccagccatgaagtcaacgcgttgagtgtggccaaggggcaactggacgtcgccaccttcaataccgagagctgggagcgcctggaagtcacccaaccggacaaggccgccatgctcaaggtgatctggaaatcgccgctgatccccgccgacccgatggtgtggagcaaggcgctgagcgacagcgagaaggccaagattcgcgacttcttcgcccactacggcgacaccgatgaagagaaggcggtgctgaagaatatgcagttgggcaagttcctgccgtccagcgatgaccagctgttgccgatccgccagttggagctgttcaagcagcgcaccaccgtcagtgccgacgacaagctggaggctgccgacaaggccaagaagctggcggatatcgacgccgacctggccaagctgcaacagcgcatctccgagctcgacaagaaaaccgcagccaacggttaacccctgtgggagggggcaagccccctcccacatttcgctcgaggacaaccatgactactttgcacgctgaagccgtcggcaaacgcacctggccgcaatacctcggctggggcctgttcctggtcctgctggcctgggcctggcacggcgcggaaatgaacccgctggcgctgtaccgcgactccggaaacatggcgaccttcgccgccgacttcttcccgccggacttccacgaatggcgcagttacctcaaggagatgatcgtcaccgtgcagatcgccctgtggggcacggtattggccatcgtctgctcggtgccgctgggcatcttgtgcgccgacaacatcaccccgtggtgggtgcaccaaccgctgcgtcgggtgatggatgcgttccgttcgatcaacgaaatggtgttcgccatgttgttcgtggttgccgtcggcctcggccccttcgccggcgtactggcgctgtggatcagcaccaccggtgtactcgccaagctgttcgccgaagccgtcgaagccatcgacccaggtccggtagagggcgtgcgggccactggtgccagtgccctgcaggaagtgatctacggcgtgatcccccaggtcatgccgctgtgggtcagctacgcgctgtaccgcttcgaagccaacgtgcgttcggcgacggtggtgggcatggtcggcgcgggcgggatcggcgtgatcctgtgggaaaacatccgtgccttccagttcgtccagacctgcgcggtgctgctggtgatcatcgtggtggtgagcctgatcgacgtgctgtcccaacgcctgcgcaagcagttcatctgacctcggaggagtgcccgcgcggcgctttttttaagcatgcagttgtctagacaagatgagccggtgtaccgcgaactcgcggatatcctgcgccgtgaattgagcagctacagcgccggtgatttcctgcccggtgaggtgcacatggccgagcgcttcggcgtcaaccgccacaccctgcgtcgcgccatcgatgagctggtgttcgaaggcagcctgttgcgtcgccagggcaagggcacccaggtgctcgaccggccgctgatctacccgatgggcgccgagacctcctacagtcaatccctgtcagcccagggcgtcggtgtgcaggcggtgttgctcaagcgccgctactgctacgccagccgtgaagaagcgctgcacctggggatcgccgaaatggcgccgatgatcgagctgcaaaccctgcgcaagctcgaccagcagcccgtcagcctgatccgccatcgctactgtgccagccgtgcgccgttgctggccgactacaccggcggttcgctgcgccagtacctgcgcgaacgcgacctgccattgactcgcacccacagccttatcggtgcgcgcctgcccaaccgtgacgaagccgcgctgctgatgatgcctcggcacttgccggccctcaccgtattcaccctttcccgcgatcgcgacggccacccggtggagctggcgcagtccaccagccgttcggatcgcttccagtaccaagtggtgacttgatggagaccctgatgaacctgtccccgcgtcagcattggattggtgtgctcgcccgcgcccaactcagtgaattgcaaccccacgaagcggccttgaaagacgcggagtaccagctcattcgcgccccggaaatcggcatgaccctggtacgcggtcgcatgggcggcaatggcgcaccgttcaacgtcggtgaaatgagcgtgacccgctgcgtagtgcgcctggccgatggccgcaccggctacagctacctggccgggcgcgacaaggtgcatgccgagctggccgccctggccgatgcccatttgcaaggcgcgcagccgagtatctggctcagcgatctgatcactgccctggcgaacgcccaggtcaggcgtcgcgctgaaaaagaggcggacaccgccgccaccaaggtcgagttcttcaccctcgtgcgaggagaaaactgatgaatgcgcaactgttgcaaccggcgtttgtcgacccggtattggacgcccagcgtggttttcgcgccgcgctcaaggccctggccgaaccggggttgatccagcacctgccatccgccccacacctcgagggcctggcgccggcgacgtacgcgttgtgcctggcactgctggacgtggacacgccgctgtggctttcaccgagcttcgacacgccgctgatccgcgccaacctggcgttccactgcggttgcccgctgacttcgcatcgcgaagcagcggtgttcgccttgctcggtgaacacgacctgctggatctgagcggcttcgaccacggcaacgaccgctaccccgaccagtcctgcaccttgctcgtgcagctcaccgacctggagtccggtcgcggcctgctctggcgcggcccaggcatcaagacccagcgccaggtgcacgtcccggtgccgcaggccttctggcaggaacgccaacggcgcaaaacctttccccgtggcctggacgtgctgtttgccgccggccatcacctgatcggcctgcctcgcagcagccgcattgcacaggagcatgcctgatgtacgtagccgtcaaaggtggcgaacaggccatcgacaatgcccaccgcctgctggcgaaaaaacgccggggcgataccgcgattccggaactgagcgtgacgcaaatccgcgagcaactgcccctggccgtggcgcgggtgatgaccgaaggctcactgttcgacgaagaactcgccgcgctggcgatcaagcaagcggcgggggacctggtggaagcgatcttcctgttgcgcgcctaccgcaccacgctgccgcgcttcagcccgagcctgccgatcgataccgcccggatgtcgttgagccggcgactgtcggccaccttcaaggacctgcccggcggccaactgctcggcccgaccttcgactacacccaccgcctgctggattttgccctgctggccgaaggtgagtacccggggccgcagaccgcgccggaggcgacgctggaagactgcccacgcgtgctcggcctgctcgccaaagaaggcctgatcaagaccgaaaccgacgacaacgcccgcgttgccgacatcacccgcgacccgctggaatacccggccagccgcgccgagcgcctgcaagccctggcccgtggcgacgaaggtttcctgctggcgctggggtactcgacccaacgtggctacggtcgcaaccacccgtttgccggtgagattcgtatcggcgatgtggaggtgtggatcgaaccggaagaactgggtttccccatctgcctgggcagcatcgaagtgaccgagtgcgagatggtcaaccagtttgtcggttcggctaccgagctggcgcagttcacgcggggttacggcctggccttcgggcatgccgagcgcaaggccatgggcatggccctggtggaccgctcgctgcgcgccgaggagtacaacgaagagatcgtctcgcccgcccagcgcgaagagtttgtgctggcccactgcgacaacgtcgaggcggcgggctttgtctcccacctcaaactgccgcactacgtggactttcagtccgagctggaactgatccgcaaactgcgccaaccggccgagggcccgagccatgaatgacgccgcgtacaacttcgcctacctcgacgaacagaccaagcgcatgatccgtcgcgccttgctcaaggcggtggcgatccctggctaccaggtgccgttcggtggccgcgagatgccgctgccttacggctggggcaccggcggcatgcaattgaccgccgcgatcctgggggacgatgacgtgctcaaggtcatcgaccagggcgccgacgacaccaccaacgcggtgtcgatccgccgcttttttgcgcgcactgcaggcgtggtcactaccgaagcgacccctgaagcgacggtgatccagacccgtcaccgcatcccggaaacgcccttgcaggcgaaccagatcatggtgttccaggtgccgatctcagagccgctgcgttttatcgaaccctcggaaaccgagactcgcaccatgcacgccctgaatgattacggggtgatgcatgtgaagctgtatgaggacatcgccaccttcggccacatcgccacggcctacgcctacccggtgacggtggatgaacgctacgtgatggacccgtcgccgatccccaaattcgacaaccccaaactcgacatgagcccggcgctgatgctgttcggcgccggtcgcgagaagcgcctgtatgcggtgccgccatacacccaggtcaccagcctcgactttgaggaccacccgttcgaagtgcagaaatgggcgcacagctgcgcgatctgcggcagccatgaatcgttccttgatgagctgattctggatgacgccggaacccagagttttgtgtgttccgacacgtggtattgcgcccagcgggtgaaggagaacaaccagtgagccagccgttattgcaagtgcgtgacctgtccctgttgtacggcccggagaagggttgccagggtgtgagcttcgatctgtaccccggcgaagtgcttgggattgtcggtgagtccggttcgggtaaatccaccttgctttcgttgttgagcgggcgcctgccgccgcacgcgggcagcatcggctaccgcagccaggacggcgaatggctcgacctctacagtgccagcgaagccgagcgccgcaccttgctgcgcaccgaatggggctttgtcgagcagaacccgcgtgacggcctgcgcatgggcgtgtcggccggcgccaacattggtgaacgcttgatggcccagggcgtgcgcaattacgcgcaactgcgtggcgccggtctggactggctggagcaggtggagattgacccacaacgcatcgacgacctgccacgcaccttttccggcggcatgcagcagcgcctgcaaattgcccgcaacctggtttccagcccacggctggtgttcatggacgaacccaccggcggcctcgacgtgtcggtgcaagcgcgtctgctcgacctgctgcgcggcctggtgcgtgaactggatttggcggtggtgatcgtcacccacgacctggccgtggcacgcctgttggccgaccgcctgatggtgatgcgtcgctctcgtgtagtggaaaccgggcttaccgaccagatcctcgacgatccacagcacccttactctcaactgctggtgtcttcggtattgcagccatgacaaatgccttgatcgaggtccgtgacctctcgaaaaccttcaccctgcaccagcaaaacggtgtagtactcaatgtgctgcgcggggtggagttcagtgtgcagggcggcgaatgcctggtgctgcacggtcagtccggcgcgggcaaaagcaccttgctgcgtacgctgtacggtaactatctaccggccggtggcagcattcgtgtacgccatgccggcgagtggctggagctggtgggcgccgcgccccgcgagattctgcaggtgcgccagcagaccctgggctacgtcagccaattcctgcgggtgattccgcgtgtggcgtgcctggatgtggtgatggagccggcgttggcccgaggctggtcgaaagccgaggcacaacagcgcgccgaacacctgctgacccgtctgaacatcccccagcgcctgtggccactggcgcccggtactttttccggtggcgagcaacagcgcgtcaacatcgcccgcggtttcatggtggcctggccggtgatgctgctggacgaacccaccgcctccctggacgaccacaaccgccaggtggtgctggaactgatgaacgaagccaaggctgccggcgctgcattgatcggcatcttccacgaccgtgccgcccgtgaagcggtggccgatcgccatttcgacatgacccccacgcctgttgcccaagaggaatacgcccatgcccgctgaacagatcctcagtaatgcccaggtcgtcacggctgatcgcatgttcctgggctcggtggtgttgcgtgatggcaagatcgtcgacctcgccgaaggccgcagccagttgccccaggcccaggacctgggcggtgatttcctgctgccgggcctggtggagttgcacaccgacaacctggaaaaacacatgaccccgcgccccggcgtggactggccgtcgacctcggcagtgctcagccacgatgcgcagattatcgcggcgggcatcaccaccgtcttcgatgcggtgtccatcggcgacgtgaaccccaagggcaaccgcatgaaaaaactgccggcgatgcttgatgccattgcccaggcagaaggtgctggcctgacccgcgccgagcaccacctgcacctgcgctgcgagctgtgccacccggacaccctcagtgtgttccgcgacctggtggaaaacccgctggtgcaactggtgtcggtgatggaccattcgccgggccagcgccagtttgtgcttgaagccaagtaccgtgagtactacatgggcaagtaccacctgaacgacgaaaccatggacgccttcatcgtgctgcaaaaggccaactccctggcctacagcgaccgctaccgtgcggctatcgtcgagcattgcctggcgcgtggtttgtcggtggccagtcacgacgacgcgacgctcgcgcatgtgcaggagtcggcacgctatggcatgaccatcgctgaattccccacgacgctcgaggcggcgaagggctgccaggcgttgaacatgaaagtgttgatgggcgcgccgaacgtggtgcgcggcgggtcgcactcgggtaatgtggccgccgccggcctggcggccgagggcttgctggatatactttccagtgactactacccggccagcctgttgcaggcggccttcgtgctggctgaccagcaagacggcggcgacctgtcgcgggcggtcaagatgatcagcctggcgcccgcgcaggcggcagggctgaaggaccgtggcgagattgccctcggcctgcgcgccgacctggtccaggcccgcaaccgcgaagggctgcctgtggtgcaacaagtatggcgacaagcgaagagggtgttttgatggcaggcaggttgatctatctcatcgggccgtccggctcgggcaaggacagcctgctggatgccgcacgcccacgcttggccgagcgcggttgccgcattgtgcgccgtgttatcacccgctcggcggaagcggtgggcgaagcggcgcagggcgtcagccccgagcaatttgcgacgatgcaggccgagggcgcgtttgccctcagttggcaggccaatggtttgttctatggcattcccagggagatcgacgattggctggcggcgggggacgacgtactggtcaatggctcccgtgcgcacctggcgcagactcgcaagcgttatccgacctcgctggtgttgctgctgacggtggaccaggcggtgttgcgccaacgcctgatcgcacgggggcgtgaagcgttggcggatatcgaggcgcgcctggcgcgcaatgcgcggttcaccgccgagctgatcgccggcaacggtgcggggttgttcgtactggataactccgggccgctggaacatacggtcgagcgcctgctgtgctgcatcgatcacgggcactcggcatgcgcctgaccttgctcggcaccggtgacgcgcggcaagtcccggtgtatggctgtgagtgcgccgcgtgcggtctggcgcgcagtgatgccagcctgcgccgtcgcccgtgcagcgcgttgatcgaatgcggcgaccagcgctggttgatcgacagcggtttgcccgaccttaccgaacgcttcccaccgcgcagtttcaacgggatcttgcagacccactatcatgccgatcatgcccagggtctgttgcacctgcgctgggggcaagggctggtgattccggtgcacgggccggtggatgccgaaggtttgtccgatctgtacaaacatccgggcatcctggatttcagccagccattcagcgaatttgaaacccggcagtttggcgaactgagcgtcaccgcgttgccgttgcagcattccaaaccaaccctgggttacctgctggaaggcgaggggcgacgcatcgcctacctcaccgacaccgtcggcctgccgcctgcgaccctggcctggctgcaacgcgaacccctggatgtactggtgctggactgttccatgccgccgcagccgcaggcaccgcgcaatcacaatgacctgacgctggcgttgcagagcatcgagcaaaccggtgcgcagttgggcgtgctgacccatgtcgggcacacattggatgcctggctgctggagcatcgccgcgagttgccacggcaagtcacggtcggctgggatggccgggtcatctgaacgccaaaggttccacagaaccctacttcgtcagtaacccttcaacgtattcgataaatgccttggctttggcacttggcattcgacccgtcggcaataccgcccacaggtccttgggcggcagttcccaatcggtcaacacggctttcacctcacccctggccaattctggtgagaacatccactcggacgtcatcgccaggccatggtgggcgagcacgcctgcgcgcaagccttcggaagaggtaacacgcaagcgtcctcgagcggcgatggcgtgttcgtgcgggccttgtttgaatgaccagagcgggctttccccgaggctgtagatcaccgcctggtggttgaggatatccgccgggctttgcggttcgccgaaacgttcgaagtaggccggtgtaccaaacacccggcttgggctttggccaagccggcgggcagtgaggccggagtcactcaggttgccgatgcgcagggcgacgtcgatgccgtcttcaaccaggttgaggaggcggtcgtcgagcaacacgtcgatgttcaggccagggtgttggtccaggaacggtcccaggttaggaatgatccgcatacgggagaacgtcacgccggcgctgacccgcaggttgcccgtcaagccagcgcctgcgccacgggcggcctcgtcagcttcatcggcttcgaaaatggcgctcttggctttctcgaaaaatgccaggcctgcctcggtgggggtcaggcccctggtcgagcgcagcagcaatcgcacggccaggcgggcttccaattgcgcgatgcttttggaaacggcgggttggccgatgcccaggcgtttggcagcggcggagaaggagccggtctcgacgacgtgaacgaaggtttccatggcagtgagacggtccatcgggcgttcctgttagctgggcggcgctcaagcctaaggcgctggactagcggtgtcatgcgtttcccgtgttgcgccggtgagttttcaatattcggtaaaacagccgtcagtcaggcatgcgcattttgtgcttgagtaaagataactctagggttacttttattcaggccaagccaaggaggcgagggtgcaaagcaggctattgatcaaggaactgcaagaggcgggttgggtattggatcgggtcacgggcagccatcacatttttacccatcgttacagcccgtacacgattcccgtgcctcatcctaaaaaagacttgccgttgggcactgtcagaagcatcaggaaacgcgccgggctatttgatttttaaggagagcattcatgcaatacccaatctgtatcgaatggggcgatgacttcaccgccaccggtatccagatccccgatattccaggcgcagtcaccgccggggacagctttgaagaggcctacaacgccgccgtggaagtcgcgcacatcatgctgcaagagatcgccgcagagggcggggccattccgatgccaacgtcggtcgcccattatcatgcccatgaggactacgccgggatgggctggggcatgttggagttggacgtcacgccctacctgggtaaaaccgagaaggtcaatgtgaccttgcccggttatgtcatccagcgcatcgaccggtatgtacgggagcataaggtcaaaagccgctcgtcattcctcgcggacgcggcgttggaaaaattggtgcggtcctagggcgatcaggcggtgtcaggtgtcggtcgcgtacgttgtcggatgagcacggttttttttgcgcatctttttccgggcatgtttgagtcagtttccttatgtttgaaattaagattttgattgaaataagggagtgtttgacaagtttttttcctctagaaatcaacttagtagtgttgttgatatgtcaggagagttgggccgatcagtgattgagtgtgttttctttgcaggtgtgtttattaagtgtttttgaaaagaaccagcactggcgaacgtgtcattgatttgagaattttagcgtcctgccaatggactggtcagcgttagtatttttcatccatggacgaatggctcttcactgttcagagtattcatcgtcatgcactttcctgtcaggcaaccttcacagcaaccccctgcgcttgcgccgaattcccttttgtcagcgtttgataacgacgccttgcactggggaaacaataagaagtcgttcagtaccgcgcaggcggctaaacatatcactcgaggtaacttcaagtttcatgatcgggacggggataataaggtcgtggtgggcttcagtttttccggcgtctttacctcggcccagaaagagcgcgccaggcaggcattgaaagcctatgccgatgtcgccaacatttcctttgtcgaaaacagcgctcatacggatggcggcatagtcatcaggggcgtgccgggttcctggtcaggctgggcggcctctcccagtcagtaccagccgaacgtaacggcgaatgtggggacgggaggcgcaggcgccaaccctgaaatgggcagtcatttcttgtctttgttggtccatgagttggggcacaccttgggcctggaacatccgggcggttacgacggcggtgggacttacgaggccaatgccgattatgcgcaggacaccaaggcccgcagtgtcatgagctattggtcggaacgcaaacaaccggggcatgacttcaacgaacagcaacccgctgcccccatgatggacgatatcgccgcgctccagcgcttgtacggagcgaatacgcgcacccgtgccaccgacaccgtctatgggttcaactccaacaccgagcgtgagcactacagcctcaggagcgcccgcgacaagcccgtgttcagcgtctgggatggcggtggcgaggacaccctggatttctccggctttaccgataaacaaaacatcaacctcaatgccgaggcgttttcggatgtgggcgggctgcgggggaatgtgtcgatcgccaagggggtgagcgtggagaacgccattggcggttccaacagcgatgtgttgacgggtaacggcgccaataaccgcttgaaaggggctggcggcagcgacacgttgcgcggcggtgccggcgccgacacattcgtgtacgcccgcgtcagcgactcaacaccccaggctcccgattttattcaggacttcaccagcggtagcgacaaaatcgatgtggctggcgtgctgcgcgaggccgggctcacgtcgctgaacttcatggatagcttcagcgggcgtgccggcgacgcggtgctcagtcatgacaccacaaccgggcgctccacactggccgtggataccacgggcaacggcacggctgacctgctgatcagcagccatggtcaaatcaaacaggaggatgtgatctggagtggtaatggggagcccgcagccgtgacgcccgatcagacggctgatctcacgctggagccggacccggatcctgcgcctgactcaacgtcacagccggatccgagtacgacgcctgggcctgcgtcttggtttggtgagcgggtgggcaaacagatagcttcaggtatctcgcttttcgcgaactggatatccgggtggttcaggtgagttcaaggtttatccaataagcccaccgaatcctcacgggaaacactcagaaagcgcagcaatgccaccaacgggaatgcactacccaccagcatcacacccagccagccgccgtgttcatacacgctgctggcaatcgccgagccgaatgcgccgccgatgaagatgctggtcatgtacagcgcgttcaggcggctgcggctgttggcgtcgagggcgtagatcgcgcgctggccgagcaccatgttcatctgcacgcagaagtccaggaccacgccggtcacggccaggccgatcacgctgtacagcgggtgcacgaaggccggcaggaagctcaacgcggcgaacaacatggccagcagcgaagcgcgatgggtgtgaccggcatcggccaggcgaccggcgatgggtgcggcaatggcacccagcgcaccgaccagggcgaacagggcgatctcgctttggctcaggccgtggttgcgcgccagttccagtggggcagcggtccagaacaggctgaaggtggcgaacatgcagccctggtagaacgcccgttgacgcagcaccggttgctgacgcagcaaggtgccgagggagcgcagcagttggccatagctggcagagtgatccggctgacgcttgggaatggtcagaatcaacaccacactgataaacgccatcagcgccgccgccgccatgaacatcgcacgccagccgaagtggtccgcgaccacgctggacaccggccgcgccagcaggatgccgagcagcaggccacccatgatgctgccgaccacacggccccgtgattcggcgggcgccaagtgcgcggccaacggaatcaggatctgcaccgacaccgaactgaagccgatcagcagcgacaccagcaggaacaggttcggctgctcggtgaccgctgcgcccagcaggctggcgatagcgatgacggtggtggcgatcatcagtttgcggttttccagcaagtcgcccaggggcaccaggaaaaacagccccagggcgtagccgatttgcgtcagcgagacgatcaggctggccatggccggcgtgaggccgatgtccggcgcgatcagctcgatgatgggttgcgcgtagtagatgttggcaacgatggcgccgcagcaaaacgcaaacagcatcaccatgctccgggtcatggtgcttgtagcgtgggaagtagcgttcatggtgttctcataaaagcgaaggaagtggggcgagcctaaagacaacaccgtagcccgggtaggccgctggcagtgataacactcatgcccggtaatgatgagtgaatcgttaactttctgcgcgaacgctgatgatacattcaggcaccactgccgaaacaggaaatccattgcaatgaagatcacgttgaacaagatgctcctggcttccacgctcgccgccgccatggccgtgggcctggcccaggctgccgagacgcctcgcgtgggcgtacgcggcgccattacggcgatggacggggacgcgatgcatgtcaaggtcaacagcggcgaagaagttgtcgtgcacttgacccaagacacccaggtgcgcgcggtcaccctggccaaaatcgatgaaatcaagccgggcagctacatcggctcggccgccatgcccaacgacgacggcagcctgacggcgctggaggtgcacgtgttccccccggcgatggccggcacgggcgatgggcatcgtgcgtttgatttgaaagaaggcagcagcatgaccaacggcaccgtcggcgacctggtggtgagcaacgggcgcacgctgacggtgaaatacaaaggtggcgagcagaagatcgtggtgccggaagatgtgccgatcgtgaacctggagccgggtgaccgcagcttactcaagccgggggtgaaggtggtgctgtttgccgcgcagggggcggatgggacgatcactgcccaagcgatctccgccggcaaggatggcgtgacaccgccgatgtaacggccaaatacagagccaaatgtgggagggggcttgcccccgatagcagtgtgtcagccagcggataaaccggctgatacaccgccatcgggggcaagccccctcccacatttatcaattactggccgctgtagatctggtcgaacaccccaccatcgttgaagtgggtcttctgcacggtgcgccagtcaccaaaggtcttctctaccgacaggaagtcgactttcgggaagcggtcggtgtacttggccaatactgccggatcacgtgggcgcaggtagttgttggcggcgatttcctggccttgcggtgaccacaggtacttcaggtagtcttcggcggccacgcgggtgcctttcttctcgaccactttgtcgaccaccgacaccggcggctcggcttcggcggaaacgctcgggtagatcacttcgaactgatcacggccgaattcacgggcgatcatctcggcttcgttctcgaaggtcaccagcacgtcgccgatctggttggtcatgaaggtggtggtggcggcacggccaccggtgtccagtaccggggcttgtttgaacagcttgccaacaaaggccttggccttgttttcatcaccgccgttcttcagcacatagccccaggccgacaggtaggtgtagcggccgttacccgaggttttcgggttgggcacgatcacctgcacgccatctttcaacaggtccggccagtctttcagggctttcgggttgcctttgcgcacgatgaaaacggtggccgaggtgaacggcgcgctgttgttcggcaggcgggtgacccagttgtccggcaccagtttgccgttgtccaccagggcgttgatgtcggtggccatgttcatggtgatcacgtcggcgggcaggccgtcgatgaccgaacgcgcttgcttgctcgagccaccgaaggacatctgcagggtcagcttgtcgttcgggtgctcggcttcccagtgtttctggaacgcggcgttgtagtccttgtagaagtcgcgcatcacgtcgtaggagacgttgagcagtgtcacgggggcagcctggacggcgcccgccagggcaaggccggcggccagaagggaggcgctaacgagttttttcactgctcattccttgttgttcgagaaggttgctgattgagtgggggcaatttgccagcgactatagctggcgtcgcatagacgcttaaagattaaaacgaactttgcttattccactttcttgaaaagattactgccacagcgtgagcagaatgcagcgttcggctcatgactgtctttcttgcacaccgggcagtcatgctgcaattgctcaccgcgcatggcactggccagttcggcggtgaaaataccggtgggcacggcgatgatcgaataaccggtgatcatcaccagggacgaaatcacctggcccagcggggtcttgggcacgatatcgccaaagcccaccgtcgtcagggtcacgatggcccagtagatgcccttgggaatactggtaaacccgtgctccgggccttcgatcacatacatcaaggtgccgaacaccgtgaccagggtgcatacgctcaccaggaacaccacgatcttctgcttgctgccgcgcagcgccgccatcaggtaattggcttgcttgaggtaggggctgagcttgagcacgcggaaaatccgcagcatacggatgatgcggatgatcagcaggtactgtgcatcgctgtagtacagcgcgaggataccgggcacgatggcgagcagatccaccaacccataaaagctgaaggcgtagcgcaagggtttgggcgaacagtacagacgcagcccgtactcaatcaggaagataagggtgaacccccactcgatatacgccagcacgtcagcgtagttctggtggatctggtcgatgctgtcgagcatcacgatcaccaggctggcgaggatgatcagcagcaggatgccgtcaaagcgccgcccggcgaccgtgtcactttgaaaaaccatgacgtagagccgctggcgccagtcgttgttgctgtccataaagcccgcctgaatcgaatatcgagcaagcctagggggattcgaaggggctgtccatgcggggtttctgcagcactcgagtaccggcgcgcaccagccagcaggcgaggatgaacggcgcggtcaacgcgggcaggtgcacagcggcaaagcctggggtgaggaggatcgccagcaggatgccgagcagcggcagccagggttggcgacgcacctggctcaatgccacagccgccaacgccgggttgtagctgtgcaggccgaggagggcactggcgggttcgtccagccacagtgcgagcagcacgccgacactggcgcctatcaacgcccatatggcggcgcggcggttggccagccacaggcccagtgcaatcagcgcacccgccaccggttgatccagcagcatgacctgcgcgagcccggtaaaaggcgcggtgaggatagccaaggtgtcgggttcgctcagggcaaacgtgttctgcggcaccgtgcccagcaacaaccagcccaggccgacaaaaggcacggtgtaagcgggcaagtcattgggctggtcggcgtgtttcaaccattgccgtgtcaacatcgccgccagtccgccgcacgcaaggatcagcggcggcagcaacgccgaccaggcgaagtgctggctgatcaataagcccagcagcacgccgttgtagctgtaaaggccggcctggcgttcggccttgggataaccgcgacgctgggccgtgagcaaccccgccacgccacccagcaatgctccgccgaacaaggccggggcgccgatcaggattgccagcagacacagcaggccgcacagcggctggcgctgcaggaagatctggctgaagccgttgagcagcgcttcggcccagtcggggcaggttgggttgtgcatggtggttagtcagtgggaccgagtcgttcccatcggaggcaagccccctcccacatttgaatctgtgaacccaatcaagtgtgggaggggcggtgcgacgattcgacttgcccccgatgaggcccttacagacgctaaatcaacgtctcgatacgcagcgagttggtcgaccccggctgcccgaacggcactcccgcggtaatcaccaacgtatccccgcgctcagccatgccctgtgcctgggcgatctccagcgccgtggaacacacctcgtctacctggcgcaggcggtcattgaccaccgaatgtacgccccatgccacgctcaagcgccgtgccgtggacaggttcggcgtgaggttgaggatcggcgccaccggccgctccctggccgcgcgcaggctggaactgcccgactcgctgtagttcaccagcaccgctaccggcaggatgctgctgatgcggcggatcgcgcagctgatggcgtccgacaccgtggcgtccgccttgggtcggttgacgtcgagctgggtctggtaatccgggccgttttccacctggcggatgatcttgctcatcatctgcacggcttccagcgggtactcgccggacgcggtttccgccgacagcatcaccgcgtccgcgccttcggccacggcgttggcgacatcggtgacttcggcacgggtcggcgccggcgagaagcgcatcgactccagcatctgcgtggccaccaccaccggtttacccagttggcgacagatgcggatgatgtctttctgaatctgcggcacgctttcggccggcacctctacgcccaggtcgcctctggccaccatgattgcatcgctcagttcagcgatttcccgcaggcgctgcacggccgagggcttctcgatcttggccaacaggaaggccttgtcgccgatcagttcgcgggcttcgcggatgtcttccgggcgctgtacgaacgacagcgccacccagtccacgcccagttccaggccgaagctcaggtcgcgccgatccttggcggtcaacgggctgagttccaacaaggcttgtgggacgttcacgcctttgcggtccgataattcgccgccattgagcacggtggtgtcgatggcgtcagcatgcttggtgatgacccgcaggcgcagcttgccgtcgtccagcagcaggtccatgcccggttccagcgccgcaatgatttccgggtggggcaggttgacccggcgctggtcgcccggcgtcgggtccaggtccaggcgcagggcctggccgcgcaccagttgcaccttgccctcggcaaagcgcccaacgcgcagcttcggcccttgcaggtccatgaggatgcccaacgggtagttcagttggcgctccacctggcggatccactggtagcgctgggcatggtcggcatgatcgccgtggctgaaattgagccggaagatattcaccccggcttccaccagttcgcggatgtcgtcgataccatcggtggccgggcccagggtggcgagaattttgaccttcttgtcaggcgtcatggtgggcagtctcaaggatcaggatggcgcggaagtcgttgacgttggtgcgtgtcggctcggtgacgatcaacccgtcgagggcagcgaaatagccgtagccgttgttgttatccagctcatcgctggccgacaggccgagggcttcggcgcggcggtagctgcacggggtcatgagggcgccggcgttgtcttccgagccgtcgatgccgtcggtgtcaccggccagggcgtacacgccgggcaggcccttgaggctgtcggtgaggctcagcaggaactccgcgttacgcccgccacggccattgccacgcacggtgacggtggtttcgccaccggacaggatcacgcacggcgccgccagcggctggccgtgttgcacgatctgccgggcgatgccggcgtgcaccttggccacgtcccgcgcttcgccttccaggtcgccgaggatcaacgggctgaacccggcctggcggactttgaccgccacggcttcgagcgattgctgcgggcgggcgaccaattggaagtggctgcgcgagagcaccgggtcgccgggcttgacggtttccgaggccgggtccagcaaccaattgcgtactgaggcgggggcgtcgatgtggtagcgcttgaggatcgccatggcctgttgcgaggtgctcgggtcgccgaccgtgggcccggaggcaatcaccgtggcctggtcgcccggcacatcggaaatcgcataggtgtagaccgtcgccggccatgccgctttcgccaggcggccgcccttgatcgccgagaggtgcttgcgcacgcaattcatctcaccgatggtcgcgccggatttgagcagggctttgttgatggcctgtttgtcggccagggtgatgccctctgcgggtagggccagcagggcggagccgccgcccgaaagcaggaaaatcacgcggtcgtcttcgccgaggttgctgatcagtgccagcacccgctgggccacagccaggccggcagcgtcgggcaccgggtgggcggcttcgaccacttcgattttcttgcacggcgcgccgtggccgtagcgggtgaccaccaggccgctgacttcgccttgccagcagttctccacgaccagtgccatggcggcagccgctttgccggcaccgatcacgatcacacggccgctgcggtcggcgggcagaaagggttcaaggacttgccgggggtgtgcggcgtcgatggctgtggcaaacagctcgcgaagcaggtgttgcggatcgaccgacataagcgggctcccggggatttttgttattagaggtgcgtcaatttcaggcttggaatggggtcaaattgtgggagggggcttgcctcctcccacatttgattgcatttcatcaggggttatttatcgcgaatcgagaagttcgccatatgctccaggcccttgatcagcgccgaatggtcccagttgccgccgccaatcgcggtgcaggtgctgaacacttgctgggtgccggcggtgttcggcaggttgatgcccagctccttggccccggccagtgccaggttgaggtccttctggtgcaggttgatgcgaaagcccggatcaaaggtgcccttgatcatacgttcgccatgcacttcgaggatcttcgacgaggcaaaaccgcccatcagcgcttcacgcaccttggccgggtcggcgccgttcttggaggcgaacagcagggcttcggccaccgcctggatattcagcgcgacgatgatctggttggccaccttggcggtctggccgtcgccattgccgcccaccaacgtgatgttcttgcccatggcctggaacagcggcaaggcgcgctcaaaggtctgcggctcgccaccgatcatgatgctcagggtgccggccttggcgccgacttcaccaccggacacgggcgcgtccaggtactgcgcgccggtttcgttgatcttcgcggcaaacgccttggtggcggtgggggagatcgagctcatgtcgatcaccaccttgtttggcgacaggcccgcagccacgccgtctttgcggaacagcacgtcgtcgacctgtggggtgtccggcaccatcacgatgatgaactcggcttcctgcgccacctgctgcgggttcgccagggcgacggcgcctgcgtcgatcagggcttgcggcgccttgccatggtgttcggagaggaacagttggtgacccgctttctgcaggttcgcggccatgggttggcccatgatgccggtgccgatgaatccgattttagccatgaaaaaatcctcttgttattacaccgcaagtccactgtgggagggggcttgcccccgatgacggtgtgtcagataaacagtgctgacagacccaccgcgatcgggggcaagccccctcccacatggagtttgcgtggtgtttgttagatcgcgttgtgggtcttcaaccaacccaaacccgcttcggtggtggtcaagggcttgtattcacagccgacccagcccgtgtagccgatgcggtccaaatgttcgaacaggaagcggtagttgatctcaccggtgcctggctcgttgcgccctgggttgtccgccaactggatgtggttgatctggcccaggtgcgcagccatggtgcgggccaggtcgccttccatgatttgcatgtggtagatgtcgtactgcagaaacaggttgtcactgcccacctgttcgcgaatcgacagggcctgcgccgtgttgttcaggtagaagcctgggatgtcgcgggtattgatcgcttccatcactagcttgatgcccaccgcttgcagcttttcagcggcgtacttgaggttggcgacgaaggttttttccagggtctcgtcatcaacgccttgtggccggatgcccgccaggcagttgatctgggtgttgcccagcacttgggcgtaggcgatggccagcttgaccccggcacggaattcctcgacccggtccgggtggcacgccaggccgcgttcgcctttggcccagtcaccggccggcaggttgaacagcacctgggtcaggccgtgcgcatcgagttgtgccttgatttcagccgagctgaattcgtaagggaacaggtactcgaccccttggaacccggcatcggcggcggctttgaaccgggcaagaaagtcctgttcggtaaacagcatggacaggttggcggcgaaacgcggcatagggttctccttaatcgagcagggaaatggcggtcggcgcatcgttgccgaccagggccagatcttcgaattcattgacggcgttgatctcggtgcccatggaaatattggtcacgcgctccagaataatctcaacgatcaccggcaccttgaattcttcgatcattgcctcggcacggcgcagggccggcgcgatctggcctggctcgaacacacgcagggccttgcaacccaggccttcggcgacggccacgtggtccacgccgtaaccgttgagttccggcgcgttgaggttgtcgaaggacaactgcacgcagtagtccatttcaaacccgcgctgggcctggcggatcaagcccaggtaagagttgttcaccaccacgtggatatacggcagcttgaactgcgcgcccacggccagctcttcgatcatgaactggaagtcgtagtcgccggacagcgccaccaccttgcggctcgggtcggccttgaccacgccgagggcggcggggatggtccaacccaatgggccggcctggccgcagttgatccagtggcgtggtttgtacacgtgcaggaactgcgcaccggcaatctgcgacaggccgatggtgctgacgtagcaggtgtctttgccgaacacctggttcatctcttcataaacacgctgtggcttgaccggcacgttgtcgaagtgggtcttgcggtgcagggtggccttgcgctgctggcagtcgtgcagccaggcactgcgatccttgagtttgccggcagctttccactcgcgggccacttcaatgaacatcgtcagggcggagccggcgtcggaaacgatgcccaggtccggggtgaacacgcggccaatctgcgtcggctcgatgtcgacgtgaatgaatttgcgaccctcggtgtacacctccaccgaaccggtgtgacggttggcccagcggttaccgatgcccagcaccacgtccgacttgagcatcgtcgcgttgccatagcggtgggaggtttgcaggccgaccatgccgaccatctgcgggtgatcgtccgggatggtgccccagcccatcagtgtcgggatgactgggatgccggtcaactcagcgaattccaccagcagctcgctggcgtcggcattgatcacgccgccgccactcaccagcagcgggcgctcggcctggtccagcagggccagggctttttccacctgcacgcgggtggccaaaggcttggccaggggcagcggctggtaggcgtcgatgtcgaattcgatctcggccatctgcacgtcgaacggcaggtcgatcagcaccgggccggggcggccggagcgcatttcatagaaagctttctggaaggcatacggcacttggccgggctccaggacagtggtcgcccacttggtcaccggcttgacgatgctggtgatgtccacggcctggaaatcttccttgtgcatgcgggcgcggggcgcttggccggtgatgcacaggatcgggatcgagtccgccgaggcgctgtacaggccggtgaccatgtcggtgcccgccgggcccgacgtgccgatgcacacgccgatattgccggccttggtgcgggtgtagccctcggccatgtgggaggcgccttcaacgtggcgagcaaggacgtgatcgatgccacccaccttctgcaaggccgaatacagcgggttgatcgcggcgcctgggataccgaaggcggtgtctacgccttcacggcgcatgacgaggacggcggcttcgattgctctcattttgctcatgattttggtgcctcttgcgttttgtaattgtatacaagtggtgtctgtccaaagtgtattcacggcgggctgcgcaggtcaatgcattttataaactggcctttgcgttcgtcggaacggcttttttcgacgtatggagcctttgtgcgaaaatattgtatacaaaaaataaagtcattgtgttctatttgttgggtcgagcatctgatcattcagacctccaccgctttcccaataacaaaagaaggacggcaccatgagcgctttaaccttgaaaattgccacccaactggccagtcaggcccttgctgcagggcgcagtgttgcggcggcgccgctgactatcgcggtactcgacagcggcggtcacttgatcgccctgcaacgggaggacggcgcgagcctgttgcgcccgcagatcgccatcggcaaggcctggggtgcgattgccttgggcaaggggtcgcgcttgttggcgctggacgcacagcaacggccggcgtttatcgccgcattgaacagcctggggcagggcagtgtggtgccggcgccgggtggggtgttgattcggaatcaggaaggcgtggtgctaggggcgatcggcatcagtggggatacgtcggatattgatgagcagtgtgcgattacggcgatcgaaggggtggggttgatggcggatgccggggtgtctgcttgatgcttcgttgactgttcgggcctcatcgggggcaagtcgaatcgtcgcaccgcccctcccacacttgaattgcgaacaccgtcaattgtgggagggggcttgcccccgatgggcacagacaccacggtgtgtcagtccggctcacaacccttgagcaccaaccggatgatggtctgcgctgcggcttcgtaatcggcctcatccagcttggccttcccggtcaccgccgagatctgccagtcaaagtccgcgtaggtctgcgtggccgcccagatgctgaacatcaagtgattggggtcaatcgccgcgatcaggccgcgatccacccaatcctggatgcacgtaatgttgtgcttggcctgggcgttcaactgctcgacctgatcagcgctcaggtgcggggcgccgtgcatgatttcgctggcgaacaccttggaggcgaacggcaggtcacgggaaatgcggattttcgagcggatgtagttactcagtacttccttggggtcgccctgcggattgaatggcgtggacgccgccaggatcggctcgatgatgctttcgagcacctcgcggtagaggttgtccttggacttgaagtagtagtagacgttgggcttgggcagcccggccttggcggcgatgtcgctggttttggtcgcggcgaagcccttgtcggcaaactcctcgctcgccgcccgcaggatcttttctttgttgcgctcgcgaatggtgctcataaacctggagtttccttgccaaggctggcggttgcgcatggtagcaccggccatccgcgagcctcaacaatctgcccgtcggcccttgcgccgcgttatgctcgcgccatctcactcttacggaagcccgattcatggcaggaagcagcttgttggtattgatcgacgatatcgccgcggtactcgatgacgttgccctgatgaccaaaatggcggcgaagaagaccgccggggtgttgggcgatgaccttgcactcaatgcccagcaggtctccggggtgcgtgccgaacgggaaatccccgtggtgtgggcggtggcgaaaggctcgttcgtcaacaaattgatcctggtgcccgcagcactgttgatcagtgcattcgccccgtgggcggtgacacccttattgatgctcggcggtgcctacctgtgtttcgaagggttcgagaagctcgcgcataagtttctccacagcaaggaccaggaccaggctgaacacgcgcagttggccgaggccgtggccgatccggcaaccgacctggtggcctttgaaaaggacaagatcaagggcgccatccgtaccgatttcatcctttccgccgaaatcatcgccatcaccctcggcaccgttgctgacgcgcccctgatgcagcaggtgatcgtgctgtccggcatcgctatcgtcatgacggtgggcgtctacggactggtggccggtatcgttaagctggatgacctgggcctgtggctcacccagaagcccggccaggtggcgcgcagtatcggcggcggcatcctgcgggcagcaccgtacatgatgaagagcctgtcggtgatcggtacggcggcgatgttcctggtcggcggtggaatccttacccatggcgtgccggtggtgcatcactggatcgaaacggtcagccagggcgtgggtggggtggcgtggttggtgccggtgttactgaatgggatggtggggattattgccgggtcggtggtgctggcggtggtcagcatggtcggcaaggggtggaaagcactgaaggcctcatatgggaaataaaaaggccattcaaacgaatggccttttttgcgaacaggttttttgagtgcagtgctgacactgtcaggtagtgttcgcgcagacttccactgactaggctgatagcgttgagtgctgagggatgagcgaacctaggagcttgtcaaattcagaaccgggttcagccatttcacctaccccatgaaatgccttaagggtcatcggggttttggctccgtcgatggttttattaccgtttcgatcatgggatttgacccattgatcggcgtcgcgaagggatgcggccctatcttctggactgcgattcacatcgtcccagtcgcctacgcgtgccttaatcaaattgttaagagtagtgacatgatgttttttagtcaggggatctatgtaactgattttatggtgtaggtgagtgcctagtgaagaaagataaggggtgttttctgctttttcagtggtcatgccgtcgcgctgagtttcggaaatgaggtattcataaaacttttgaagttcagagccaggttcagtcaattcagacactgagtgatataacttacggctcgtatgcgttttggcaccgtcgatctcgtgattaccgttttgatcaaaattcctgactatgtcattggctctcagacgggaaatctgattttcttttgtaccgcgacgctcatcgtcccagtcacctacgagctgcttcaacatttttatgggggtagtaaacgtttcctcattagtcaccgggtcaaagtgcacgatgtgttgattgagggtgcggcctggtgaagaaagataaggggtttcatctggtttctctttcatcacgttctcggaatgattcgaggcctgtgaagaaagtgcatgtgccgcatagaaaggttgctgggcggcgggggttatagggagcgacatgtcatattccttgtgtgatgttgaatgtaacaggtgttgagaatctagtctgtttccacaaggtgagtggtgaatgagaggacgtggttcataaaatatatattttgtttcaattatgagaaatgcgttttgacgggtatgggatctttcgttgcaatcgtaggggtgggagctgatgtagcaataagagtcggggatgtcgggttttgttaaggggttgatgtatgaggtttattgatcgagtgtaaataataatttctggaatatttcagattgttgtgtgaattgcatcaggtacatcatttgatgcgcagtgccgagtgtgtttttgtgatcgagtggttccacagataagtaggttggaggaagggggctagtagtgtgcagggatgatggaaataaaaaggccatccggattgctcgaatggcctttttcttactgagcttcttttactcagctatttgtaactttcgagactcggtatatatataccgcaccttctcatactcaaacggcgagttcatctgcccataccggaagctggtctgataacgtttatccaccgcacgcaacgcccagatttccgggtggttggagctgacttccgacacgttgaggaagttgatctgggtttccgcgccgtagtcgacgatcaggccggtggtgtcgcgcaggttcgacgggccgaagatcggcagcaccaagtacgcgccgccgggcacaccgtagaagcccagggtctggccgaagtcttcgctctggcgcggcaggcccatggcggtggccgggtcccacaggccggcgatgccgatggtggtgttgagcagcaggcgcccggtggtttccagggagcggtggcccttgagttgcagcaggctgttcagcaggttgggcacgtcgcccaggttgttgaagaagttgctcacaccggtgcggaggaagctgggtgtcacataggtgtagccattgaccaccggcaggaacacccattggtcgaagcggtagttgaagtggtacacgcgacggttccacgactccagcgggtcatacacgttgagtgcggtgagcgacgagcgctcgaactcacgctgatccaggcctgggttgaacttgagcttgctcagcggttccttgaaaccgtcggcgtccacgttgaccggctcatgggccttgctgttgtcggcattggccacgcctgcgcacatcaaggcggcaagcagcagaagatatttagccacggaagaactccagcatggcgtcggcgttgacgcggtaattgaggttgccgcagtggccgcccagcgggtagacggtcaagcgatcgccgaaggttttacgcaggaaaccgaggtcgccagggccgaggatcacgtcgtcggcgttatgcatgacggcaattttcgggctgttgtgcaggtagtccttgagggcgtacaggctgacctggtcgaccagttgcaacaggctgccgccgtcggagcgtgcgcgccacatcggaatcacttgctcggtgaggtagcaatcgaagtcgcattgcagcgcacgcttgaggaacggcgtgaggctggtgccttcggtgatcgggtatttcggtgggatgatcaggccacgacggttgatcaggtccgaagtaaaggcgatgtcggccgctgaaaagcggaacgaggtgccgatcagcatggccatctgttcgttggtcaggtgctgcttggattgctggaagtcgtagagcagggcgtcgttgaggtcgatgtagcccttttgctggaagtagcgggtcagcttgttcagcaccagttcatagaaggtggtggtgttgttgatgcccttgacctcggtctgtaccagcttgtcgaggttggtgatcgaggtgtagaggttgaccggcgggttcagcagcaagactttcttgaagttgaagctgcgacgggtctcgtccagcttggccacgaatgccgcatccaggccgccgaggctgtagccggtgaggtagaagtcggtcaccggcagcgaggcgttctgtgcgcgcacggcctgcatcacgcggtacatgtcttcggcgtcttcctgggtgatccccggggtggcgaagcgtgaggcggcgctgatgaagtcgaagctggtgggcgacgacagttgcaccacgtggtagccggcctggtaatacagcttcttcaagtattcgttgatgctgctgtcgaatcgcgcgccggtgccggcgatcaggaatatcagcggcgcggcacggtcctgcttggcgatgcggtaggtgagtttcttcaccgcccagaagttgtccggcaggctgaactcgcgctcggggcgcatgttcagggtgtagtcggattggttgatctcgtcatcgctcggcaatttgggccgaaggtcgggcggtgtagtggcgatggtcgcttcaaacgggttggccaaagggtagccatagctggcttggtcaatgtcgacggccagtgctgacgcactcaaaaaaaggctgcccagcaaggcagcacagcgcaaggaacggagcatgacttaatccctaggaggaaacgtgcttaatgaagttcgcaggctatgaccaccgcgttgtcaccgaagtgccagcactcggcacgaaaagtcggaaaataacgtcggaatcggggtaatagtagccagacgatacactttgccacgcattggtgaacactaattgtgtgtatgcgccttgctaacggccaccggggcattaagctgggcgccgtttttgcctatcggagtggcccatgtcccgtcgtttaccgctgatttttctgctaattgccctgccgctatggctggctgccagttacggcgcgcgctttggctttatggaagatggccagtgggtcggcatctgcatcgatgaggccagccgctgggaatgccaattgcgttcgaacctgggcctgatgatccacttcaaggtgctcggttgggcagcgttgatcacgtcggtgctggcgttttttgtgccggggcgtgcagggtgggggttggcggtgctgggtatggtgttcgggttgccggcattggcgttgtacaacaccacgtttgcggtgtttgcggtggtgatcgcggggttgcggttggtcaggaaagggcgggcagcctgatagggcctcatcgggggcaagccccctcccacattggtaatgcactgacctgtgggagggggcttgccccgatagcggttttagaccttgcgcacccgcaagcagcgccacaaggctgccgtcatgagcaggctcactaccgcccaaccccaggcctgctggttcaacaacccttcacggtacaactgcggcgcaatacccgcaccgatgatgaaggccagcaacgcaatctcccgacgcggcccggttaccgggcgcaccaggtacaccagggctggcaacaccagcgcggcgctagggaaactgcggtagcgtgggtcaaacaccagtgccagcatcattactgcccctgcaaacccggcaatcgccaccagccagcctgcgcgttgctccagccagttgaaggcgcgtgcgcgccaatcttcccgtgagctgaggctcaaggcggcatgggtcagcaccagcaggttcaacaccaccagcaagcctgcccacacccattcatcgttgaagcgcgcggtgacgcgcgtcagctcggcccaggtgccgatggagcaggctgccacggcacccagcagtggcagggcgatggcggcccgcacactgcgcacgcgaccacccagcaccagagtgcccagcaggatgattccacctacacccagccatagcggccagtacggcacattggtcacgggcccggcgaggatgcccttgtcctggcgatcggcatcgaacaggccccagtaaccgcccacggcgccttcgcttgcgcgcttccatggctggtcaaaggcttcgatcaggttgtagcgccagccattggcttccgccatagccacgaaacctcgcatgaacttggcttcgttgacccggctcggtacggcggtttcgcgctggcggccttcgctgggccagccggtttcaccgatgaggatgtccttgggcgcgaatttgttgccgaaggtctggcgcacatcacctacgtgcttgagtgcctggtcgatgccagaagggtcatcttcccagtacggcagcaggtggatggtcaggaagtccacggccggcgcgatttccgggtgttgcagccagaactcccacacgtccgcgtaggtcaccggctgcttgatccggcttttgacggtctggatcagcgtcaccagctgtttggcggtgacttctttacgcagcagcgcttcgttgccgacgatcaccgaggtcactacatcagggttggcgttggctgcggcgatcaactcttcgatttctttctcggtcgccaccgggtcactactgacccaggcaccggccatcaccttcagtccatgcttgcgtgccatctccggcaaggcttccaggccggtcatggagtaggtgcgaatgcattcgaagcgcgtggccagcagggccaggtcggcatccatgcgttccgggcgcagtgtgaacggctggtcaaacggggattggtctttatcgaacggtgtgtaggaagcacattgcatcttgtgtgtggcactggcgacatcgggcagtaccacgggccggccgaggccataccagtaaccgatcagggccagcaggccgaggagcaaggcgcagaaatagggcagggcagggaagcgggcagtcgcaggcatggtcggcttatctgggggagcaaaggcgcgcatcttacccggatttgggccgtcccagtggggcagcataattttgacatgcaaagttcgggcgggattttggcgtcacgtcctacaaaatgccctgctggctatgtgatgtcgtttcttgcttgtatgaggtcgctgacagagcaggtcgaaggacgcggcaggttgatgatcgaagtgtcagcactccactgatgccgcagacaccggatcgatgcgcgtgacgggggcgcggtgcaccacataacaacaggttgacgtcgctcggcatccgtcgggcgcagcactttcggggaagtacgatgaagatgcgacgactcttgggcgcagctgccactctggtagttgcgatgagctccacactggccagcgccgacagcaaaaccctgagcatcggctatgtggacggctggtccgacagcgttgccaccacacacgtggcggcagaggtgatcaaggccaagctcggttatgacgtgaaactgcaagcggtagccaccgggatcatgtggcagggcgtggccactggcaagctcgacgccatgctgtccgcctggttgccggtgacccacggtgagtactgggccaagaacaaggacaaggtggtcgactacggccccaacttcaaggatgcgaagatcggcctgatcgtgccggagtacgtcaaggccaagtccatcgaagacctcaagaccgacaccaccttcaagaacaagatcgtcggtatcgacgccggctcaggcgtgatgctcaagactgacgaagccatcaagcagtacggcctcgactacaaactgcaagccagctcgggggcggcgatgatcgccgagttgacccgtgccgaagacaaacaggaatccatcgcggtcaccggttgggtgccacactggatgttcgccaagtggaaactgcgtttcctggacgacccaaaagggatttatggtgctgctgaaaccgtcaacagcatcggcagcaagggcctggagaagaaagcgccggaagtcgcggccttcctgaagaaattccagtgggcctccaaggacgaaatcggcgaagtcatgctggctatccaggaaggcgccaagcctgatgcagcggccaaggattgggttgccaagcaccctgagcgtgtagccgagtggaccggtaagtaatacggtaagcaaaacccctgtgggagggggcttgcccccgatgagggcgtgtcagttgaaatatcaatgactgatacaccgccatcggggggcaagtcccctcccgcattagtttcaccctctgcaaatcttcctgcattctcaaaacccctcgctacactcgatctaagactaaggtcgtctggaacctgttccgcagccgcatacagtggatacgttccaataataaaaaagctgtgctgcgaggataaaaacaatgaacgacagcatttacctctcgattcaaaacagcccgcgtttcaaggagctggtgagaaaaagggaaaggttcgcctggattctctcggcgatcatgctagggctttactccgctttcatcctgttgatcgcctacgggccacaagtacttggggccaagctcagccctggttcgtcgattacctggggcattcccttgggcgtcgggctgattgtgtccgccttcatcctgaccggcatctacgtgcgccgggccaatggcgagtttgacgacctgaacaatgcgattctcaaggaggctgcgcaatgatcggtcgtctactggcaatattcggcgcttcactctttgctccggccgtttgggcggcagacgcattgaccggtgaagtgcacaagcaacccctgaacatatcggccatcgtgatgtttatcgcgtttgtcggtgcgaccctgtgcatcacctactgggcttccaagcgcaacaaatcggcagctgactactatgcggccggcggcaagatcaccggtttccagaacggcctcgcaattgccggcgactacatgtcggcggcgtccttcctggggatttccgcactggtctacacctccggttatgacggcctgatctactcgatcgggttcctggtgggctggccgatcattctgttcctgatcgccgagcgcctgcgtaacctgggcaagtacacctttgccgacgtggcgtcctatcgcctgggccagacccagatccgcagcctctcggcctgtggctcgctggtggtggtggcgttctacctgatcgcgcagatggtgggcgcgggcaagctgatccagctgctgttcggcctggattaccacgtagcggtgatcctggtgggtatcctgatgtgcatgtacgtgctgttcggcggcatgctggcgaccacctgggtgcagatcatcaaggcggtgctgttgctgtccggtgcctcgttcatggcgctgatggtaatgaagcacgtcaacttcgactttaacgcgctgttctccgaggcgatcaaggttcaccctaaaggtgaagcgatcatgagccccggcggtctggtgaaagacccgatctcggcattctccctgggcctggcactgatgttcggtaccgccggcctgccgcacatcctgatgcgcttcttcaccgtgagcgacgccaaggaagcgcgcaagagcgtgctgtatgcaactggctttatcggctacttctacatcctgaccttcatcatcggtttcggcgcaatcctgttggtgagcaccaacccggcgttcaaggatgcggctggcgccttgcttggcggtaacaacatggcggcggtgcacctggccaacgcggtgggcggcagtatcttcctgggcttcatctcggcggtggccttcgccaccatcctcgcggtggttgcaggcctgaccctggccggtgcgtcagcggtgtcccatgacctgtacgccagtgtgatcaagaaaggcaaggccaacgacaaggatgagattcgcgtctcgaagatcaccaccatcgcgttgggcgtattggcaatcggcctgggtatcctgttcgaaagccagaacattgcgttcatggtcggcctggcgttctccattgctgccagctgtaacttcccggtgttgctgctttccatgtactggaaaaacctcaccacccgtggcgcgatgatcggcggctggctgggcctggtcagtgcggttggcctgatggtcctgggcccgaccatctgggtctcgatcctgcaccatgaaaaagcaatcttcccttacgaatacccggcgctgttctcgatgatcattgcgttcgtcggcatctggttcttctccatcaccgacaagtcggcggcggcagagaaagagcgtgcgctgtacttcccgcagtttgtgcgttcgcagactggcctgggggcgagtggggcggtgtctcactaaggtcgtagctggatagggaaatgccccggtcgaaaggccggggcatttttttgtctggggttctgcgttatgggtactcgcgtcatcgggggcaagccccctcccacatttgactgtattcacaaatagacatgtttgaaccgcgcccggtgtgggaggggggcttgcccccgattgcggtcgaccagttgtcacaaacaaaaacggcctccactaggggaggccgttttcggtgcaactaagcgatgcttacttgcgatcttccagcttggtgatgtcacgcgactcgtagccggtgtacagctggcgcgggcggccaatcttgtacgggctggagagcatttctttccagtgggagatccagcccacggtccgcgccagggcgaagatcacggtgaacatgctggttggaatgccgatcgccttgaggatgatccccgagtagaagtcgacgttcgggtacagcgagcgttcaatgaagtacgggtcggtcagggcgatctcttccaggcgcatggccagttcgagttgcggatcgttcttgatgcccagttccttcaacacttcgtcgcaggtctgcttcatcacggtggcacgcgggtcgcggttcttgtagacccggtgaccgaagcccatcaacttgaacggatcgttcttgtccttggccttggcgatgaatttgtcgatgttcgagacatcgccgatttcatcgagcatggtcaatacggcttcgttcgcaccgccgtgggcagggccccacagtgcggcgatgccggcggcgatacaggcaaacgggttggcacccgaagagccggccagacgtacggtcgaggtggaggcgttctgctcgtggtcggcatggaggatgaagatccggtccatggccttggcgagtgtcgggctgatcggtttgatctcgcacggcgtgttgaacatcatgtgcaggaagttttccgcgtacgtcaggtcgttgcgcgggtacatcatgggttggcccatggagtacttgtaaaccattgcggccagggtcggcatcttggcaaccaggcggatcgcggagatttcgcgatgctgcgggttattgatgtcgagggagtcgtgatagaaggccgacagggcgccgaccacgccgcacatgacggccatcgggtgggcgtcgcgacggaagccgttgaagaaggtcttcaactgctcgtgaaccatggtgtggttcttcacggtgctgacgaactgggctttctgctcggctgttggcagttcgccatttagcagcaggtagcaggtttccaggtagtccgacttctcggccagttgctcgatcgggtagccgcgatgcagcaaaatgccattatcgccatcgatataggtgatcttcgactcgcaagaggcggtcgacatgaagcctgggtcgaatgtgaaacggcccgtggccgtcaggccccgtacgtcgataacatcgggaccaacggtgccggttaaaatgggcagctcgacgggggctgcgccctcgatgatcaactgcgcttttttgtcagccatgtggcctcctatttatgcttcaaatcatcagacagaccccccacgcagggcccgcaccactatattgatataaatccagatgtcaatttgcctaaagtcttgcgccagaaggctttaaccgtactttttcctcgaaattgcctgccatttacgccttttattctcccagcgcaatccgctattagggtgaggagtgcgcgttgtcattagtaacctaactgtctatactcggccaccgaccgccaagggcttttgggcttgctttcattgggggtcgcactccctgggtggtgcttacctgaccagtgcactccccaacaactttgccctgattgttaggggctcttcagtgtgaaaaaaagccgtgaatagccaacgacctgtaaacctagacctaaggaccatcaaactccccatcaccggcgttacgtcgttcctgcaccgtgtttccggcatcatcctgttcctgggctcgggcatcatgctttatgcattgagcaaatccctgggttccgaggaaggatacgccgaggtgaaggcatgcttgaccagcccgctggccaagttcgtagcatggggcctcctgtcttctcttctgtatcacctggtagccggtgtgcgccacttgatcatggacatgggcatcggtgagacgctggaaggcggccgcctgggctcgaaaatcatcatcgccatttccgtggtgctgatcgttctggcaggagtttggatatggtaaccagcgttacgaatctgtcgcgttcgggcctctatgactggatggcacagcgtgtgtctgcggtcgttctcgcggcttatttcattttcctgatcggatacctcgtcgcaaatccgggcattggctatgagcaatggcacggcctgttttcccacaatgcgatgcgaatcttcagtctgctggcccttgttgccctgggcgcacacgcctgggtaggcatgtggaccatcgcgaccgactacctgacgccgatggcgctgggcaagtccgcgactgcagtacgtttcctcttccaggcagtctgcggcgtcgcgatgttcgcttacttcgtctggggtgtgcagattctttggggtatctgattcatggctaacattccaactatttcattcgacgccatcattattggtggcggcggtgctggcatgcgcgctgcgctgcagctggcccagggcggtcacaagactgccgtgatcaccaaggtgttcccgacccgttcccacaccgtatcggcccagggtggcatcacctgcgccatcgcctccgccgacccgaacgatgactggcgctggcacatgtacgataccgtcaagggttccgactacatcggtgaccaggacgctatcgaatacatgtgtcaggaaggcccggccgcggtgttcgagctggaccacatgggtctgccgttttcccgtaccgagcaaggccgtatctaccagcgtccattcggcggccagtcgaaggattacggtaaaggcgggcaggctgcccgtacctgcgctgcgtccgaccgtaccggtcacgcgctgctgcacaccctttatcagggcaacctgaaagccggtactacgttcctgaacgagtactacgcggttgatctggtcaagaacgcacaaggcgagttcgtcggtgtgatcgcgatctgcatcgaaaccggtgaaaccacctacatccgcgccaaggccaccgtgctggcgaccggcggtgcaggccgtatctacgcgtccaccaccaacgccctgatcaacaccggtgacggcgtcggcatggcactgcgtgcaggtgttccggtacaagacatcgagatgtggcagttccacccgactggtatcgccggcgccggtgtactggtgaccgaaggttgccgtggtgaaggtggttacctgatcaacaagcacggcgagcgtttcatggagcgttatgcgccgaacgcgaaagacctggctggtcgtgacgttgtggctcgttcgatggttaaagagatcatcgccggcaacggctgtggtccgaatggcgaccacgtactgctgaaactcgatcacctgggcgaagaagtactgcacagccgcctgccaggtatctgcgagctgtccaagacgtttgctcacgttgacccggtagttgccccggttccggtcgttccgacttgccactatatgatgggcggcgtgccgaccaacattcatggccaggcgatcacccagaacgctgaaggcgaggatgaaatcatccacggtctgttcgccgtaggcgaagtggcctgcgtatcggttcatggtgccaaccgcctgggcggcaactcgctgctcgacctggtggtcttcggtcgtgctgctggcctgcacctggaaaaagcgctgaccgacggcatcgaatacgatgacgctaccgacgccaacatcgaggctgcactggcccgtctgaacgcgctgaacgagcgcactgatggcgaagacgtggcaaccctgcgtcgcgagctgcaaagctgcatgcagaactacttcggtgtattccgtaccggcgaatacatgcagaagggtattgcccagctggccgatctgcgcaagcgtatcgccaacgtcaagatcaacgataagagccaggcgttcaacaccgctcgtatcgaagcccttgagctgcagaacctgctggaagtggccgaagcgactgcaatcgctgccgaggttcgtaaggaatcccgtggtgctcacgcccgtgaagactttgaagatcgcgacgacgaaaactggttgtgccacaccctgtacttcccgggtgacaagcgcgtgaccaagcgtgccgtgaacttctcgccgaagacggttccgacgtttgaaccgaagattcggacttactaagggtggctgccatgttgaaagtcagtgtttatcgctacaaccctgatcaggacgctgcgccgttcatgcaggaattcaaggtcgataccggtggtaaagacctgatggtgctggatgtactggcactgatcaaggagcaggacgaaggtttctcctatcgtcgctcttgccgtgaaggtgtgtgcggttccgacggcatgaacatcaacggcaaaaacggcctggcgtgcatcacgccgctgtccgccgtggtcaaaggcaacaagctgatcgttcgtcctctgccaggtttgccggttatccgtgacctggtcgtcgatatgagcatcttctacaagcaatacgagaaagttaagccgttcctgcagaacgacacgccggctccggccatcgagcgtctgcagtccccggaagagcgtgagaagctcgacggtctgtacgagtgcatcctgtgcgcttgctgctcgacgtcgtgcccgtccttctggtggaacccggacaagttcctgggtccagccgccctgctgcaagcgtaccgcttcctggcagacagccgtgacaccaagacgtccgagcgtctggcttcgctggatgacccgttcagcgtattccgctgccgcgggatcatgaactgcgtcaacgtatgtcccaaaggcctgaacccgactaaggccattggtcacatccgcaacatgctgctgcagagcggcgtgtaactgacgttgtagtaaaagcaggaccgttgtgcccgtaaatgctacggcgcaggcttcaaccggcgccgtagttttaacttgagcagcgacttacaaagccgcggctcttattttgaagaaatgagacaagcaggggcattcgggttggtacccgaactatcagcgtgatcctaagtggcttgttttggtcgctgcacttggccttttgcaagcaaactcggtgttttcgccggtggtgtccccaaatcgagggtgaccaagcatgcaagaaagcgtgatgcagcgcatgtggaacagcggctatctttcaggtggtaacgctgcctatgtggaagagctttatgagctctacctgcacgaccctaacgctgtgccagaagaatggcgcaccaaatttcagacgttgtcttcagacggcaacgctgccaccgatgtatcgcatgcaacaattcgcgatcagtttgtgctgctggcaaagaaccagcgccgcgcccaaccggtttccgccggtagcgtgagcagtgagcacgagaagaagcaagttgaagtattgcgactgatccaggcctaccggatgcgcggccaccaggcggcccagcttgacccgctggggctctggcagcgtcctgcacctgctgacttgtcgatcaatcattacggcttgaccaatgccgatcttgatacgaccttccgtgccggcgacctgttcatcggcaaagaggaagcgagcctacgcgaaattcacgaagcgttgcagcagacatattgccgcaccattggcgctgagttcacgcacatcaccgattccgagcaacgccactggttccagcatcgcctggaaggtgtgcgtggccgtccggtgctgtccgccgacgtacgcagccacctccttgagcgcgtaaccgctgccgaaggcctggaaaaatacctgggtaccaaatacccgggcaccaagcgtttcggcctggaaggcggcgaaagcctgatcccgatgctcgacgagctgatccagcgttccggttcctacggcaccaaggaaatcgtgatcggcatggcccaccgtggtcgcctgaacgtgttggtcaacaccttcggcaagaacccgcgtgagctgttcgacgagttcgaaggcaagaagaaggtcgagctgggttccggtgacgttaaataccaccagggcttctcgtccaacgtgatgaccaccggcggtgaagttcacctggccatggccttcaacccatcccacctggaaatcgtttctccagtggtcgagggttcggtgcgtgctcgccaggatcgtcgtaacgacaccacgggtgaaaaggtcctgccgatttccatccacggtgacgcggcattcgccggtcaaggcgtggtcctggaaaccttccagatgtcgcagacccgcggcttcaagaccggcggtaccgttcacatcgtcatcaacaaccaggttggcttcaccatcagcaacccgctggatgcgcgctccaccgagtacgccaccgacgttgccaagatgatccaggcaccgatcctccatgtgaatggtgatgatccggaagccgtgctgttcgtgacccaactggctgtcgactaccgcatgcagttcaagcgtgacgtggtgatcgacctggtctgctaccgccgtcgcggtcacaacgaagccgacgaaccaagcggcacccagccgttgatgtaccagcagatcaccaagcagcgcaccacccgtgagctgtatgccgaaagcctgaccaaggccggcgtggttgacgatgcacgtgttcaggcgaagatcgatgaataccgcaacgcgctggacaacggtctgcacgtagtgaaaagcctggtcaaagagccgaacaaagagctgttcgtcgactggcgtccatatctgggtcacacctggaccgcgcgtcacgacacctcgttcgatctgaaaaccctgcaggaactgtccgccaagctgctggaaatcccggaaggcttcgtcgtacagcgccaggttgcgaagatctacgaagaccgtcagaagatgcaagccggcggcctgccgatcaactggggttacgccgaaaccatggcgtacgcgaccctggcgttcgaaggtcacccgatccgcatgaccggccaggacatcggccgtggtacgttctcgcaccgtcatgcggttctgcacaaccagaaagacgctggcacctatgtgccgctcaagcacctgtacgaaggccagccacgcttcgacctgtacgactcgttcctgtccgaagaggccgtactggcgttcgaatacggttactcgaccaccacgccgaacgcgctggtgatctgggaagcccagttcggcgacttcgccaacggtgcccaagtggttatcgaccagttcatcaccagcggcgagcacaagtggggtcgcctgtgcggtctgaccatgctgttgccacacggttatgaaggccagggtcctgagcactcctcggcccgtctggagcgttacctgcaattgtgcgccgagcacaacatccaggtatgcgtgccgacgacccctgcccagatctaccacttgctgcgtcgccaggtgatccgcccgctgcgcaagccgctggtagtgctgacaccgaagtcgctgctgcgtcataaattggccatctcgaccctggaagatctggctgatggttcgttccagaccgttattccagaaatcgacacgctggacgcggccaaggtgactcgcctggtcctgtgcagcggcaaggtctactacgacctgctggaaaaacgtcgtgccgaaggccgcgaagacatcgccatcgtgcgtatcgagcagctttacccgttcccggaagacgacctgatggaggccattgcgccttacaccaacctcaccaacgtggtgtggtgccaggaagaaccgatgaaccagggcgcgtggtacagcagccagcatcacctgcgtcgcagcatcggcaaccacaacaaggccctgggcctggaatatgccggccgtgatgcttccgctgcacctgcgtgtggttatgcgtcgatgcacgccgagcagcaggaaaaactgctgcaagatgctttcactgtttaacgccttcgcgctgactgaaaccgaattttaaggacccacagataatggctatcgaaatcaaagccccgtcattcccggaatcggttgccgatggcaccgttgccacctggcacaagaaaccaggcgacgctgtaaagcgtgacgacctgatcgtcgacatcgaaaccgacaaagtcgtgctggaagtgttggccgaagctgacggcgtgctgggcgcaatcgttgccgaagaaggcgctaccgttctgtcgaaccaggtactgggctcgatcgaagagggcagtgctgctgccgctgcgcctgctgctgcgccggccgccgccgctgctgcgcctgctgccgctccggctggtggcgctgaagacccgatcgctgcaccggctgcccgccagctggctgaagagaacggcatcaacctggcctccatcaaaggcaccggcaaagacggccgtgtgaccaaggaagacgtggttgcggcggttgaagccaagaaaaacgctccggctgccgcacctgccaaggctgctgccccggctgctgctgcgcctgtgttcgccgccggcgaccgcaccgagaagcgcgttccgatgacccgcgtacgtgccaccgtggccaagcgtctggttgaagcccaatcgaacatggcgatgctgaccaccttcaacgaagtcgacatgaccgaagtcatggccctgcgttcgaagtacaaggatctgttcgagaagtcccataacggcgtgcgcctgggcttcatgtccttcttcgtgaaagcggccaccgaagcgctgaaacgcttcccggcagtcaacgcttccatcgacggcaacgacatcgtttaccatggctacgcagacgtcggcgttgccgtgtccagcgaccgtggcctggtggttcctgtactgcgtaacgccgagctgatgagcctggctgaaatcgaaggcggcatcgccactttcggcaagaaagcccgtgacggcaagctgaccatcgacgagatgaccggcggtaccttcaccatcaccaacggtggtaccttcggttcgatgatgtcgaccccgatcgtcaacccgccacaagccgcgatcctgggcatgcacaacatcatccagcgtcctatggccatcaacggccaggtcgtgatccgcccgatgatgtacctggcgctgtcttacgatcaccgcctgatcgatggtaaagaagccgtgactttcctggtgaccatcaagaacctgctggaagacccggctcgtctgttgctggatatctgattgaagcagctgcaagttgcgagctacaagctgtaagaaaaagcagcttggcttgcagcttgcggctaaaagcttgtcgcaaatagaggatctattttcatgacacagaaatttgacgtcgtagtgattggtgcaggtcctggcggctacgtagccgctatcaaggccgcacaactgggcctctcgactgcttgcatcgaaaaatacaccgacaaggaaggcaaactggcactgggcggtacttgcctgaacgtcggttgcattccttccaaggcgctgctggacagctcctggaaattccacgaagcccaggacggcttcgcgatccacggcatcaaccatgctggcgtgaccatggacgtaccggcgatggtcggtcgtaaagccaacatcgttaagggcctgacttccggcgttgccaccttgttcaaggccaacggcgttacttccctgcaaggccacggcaaactgctggccggcaagaaagttgaaatcaccaagccagacggttcgactgagatcatcgaagccgagaacgtgatcctggctccaggttcgcgtccaatcgacattccgcctgctccagtcgacaacaacgttatcgttgattcgaccggggccctggaattccaggctgtgcctaagcgcctgggcgtgatcggcgctggcgtgatcggcctggaactgggttcggtctggtcccgcctgggtgctgaagtgaccgtgctggaagccctggacacgttcctgctggctgccgacacggccgtttccaaggaagcgctgaaaaccctgaccaaacaaggtctggacatcaagctgggcgctcgcgtcaccggctcgaaagtcaacggcgaagaagttgtggtcaactacaccgacaaggatggcgaaaaaaccatcactttcgacaagctgatcgtagccgttggtcgccgtccagtgaccaccgacctgctggcatccgacagcggcgtgagcatcgacgagcgtggtttcatccatgttgacgatcactgcgcaacttccgtgcctggcgtgtacgccatcggcgacgtggttcgcggcatgatgctggcgcacaaggcttccgaagaaggcatcatggttgtcgagcgcatcaagggtcacaaaacccagatgaactacgacctgatcccatcggttatctacacccacccggaaattgcatgggtcggcaagaacgaacagcagttgaaagctgaaggcgttgaagttaacgtcggcaccttcccgtttgccgcttctggccgtgccatggcagccaacgacaccggtggttttgtcaaagtcatcgctgatgccaagactgaccgcgtattgggcgtccacgtgattggcccgagcgctgcagaactggttcagcaaggcgcgatcggtatggaattcggcaccagtgccgaggacctgggcatgatggtcttctcccatccgaccctgtccgaagcgttgcacgaagctgcgttggcagtgaatggcggcgccatccacatcgccaaccgcaagaagcgctaagcgagataataagaaaccacggcggagttgcccgtcgtgagccttgcgcgcaagactcaccgcggaatatccgctggacgcagccttgcgcagctttacgggccttgagccccgcaagttgcgcaagcagcagtcacaggtggcgcggcactcataatgagcgcagcgccgaatgcgcagtacctaacgaagacggtaaaaagcatgaatcttcacgagtatcagggtaagcagctgttcgctgaatacggcctgccagtttccaagggctacgcagtagacaccccggaagcagcagcagaagcttgcgacaaaatcggcggcagcgagtgggttgtcaaagcccaggtccacgccggtggtcgcggtaaagcgggcggcgttaagctggttcgcagcaaagaagacgccaaggccttcgcacagcagtggctgggcaagcgtctggtgacttaccagactgatgccaatggccagccagtcaccaagatcctggttgaatcgtgcactgatatcgctaaagagctgtacctgggcgctgtcgttgaccgttcgagccgtcgcatcgtgttcatggcttccaccgaaggtggcgtggacatcgagaagatcgctcacgaaaccccagaaaaaattctgaaagccactatcgacccactggttggcgctcagccattccagggtcgcgagctggctttccagctgggcctggaaggcaagcaagttgcccagttcgccaagatcttcgtgggtctggccaaactgttccaggatcacgatctggccctgctggaagtgaacccgctggtgatcaaggctgacggcgatctgcactgcctggacgccaagatcaacatcgacgccaacgccatgtaccgtcagcctaagctgaagactttccacgatccttcgcaagacgatccgcgcgaagcgcacgctgccaagttcgaactgaactacgtagccctggaaggcaacatcggctgcatggtcaacggtgccggcctggccatgggtaccatggacatcgtcaacctgcatggcggcaaaccagccaacttcctcgacgtgggcggtggtgctaccaaagaacgcgtaaccgaagcgttcaagatcatcctgtccgactccaacgtcgctgcagtactggtcaacatcttcggcggcatcgttcgttgcgacatgattgccgaaggcatcatcggtgcagtgaaagaagtcggcgttaaaatcccggttgttgttcgccttgaaggtaacaacgctgaactgggcgctaaagtactggcagaaagcggtttgaacatcatcgcggctaccagcctgaccgacgctgctcaacaagttgtcaaagctgcggagggcaaataatgagcgtcctgatcaacaaagacaccaaagttatctgccagggtattaccggttcgcaaggtagtttccacacccagcaagccatcgaatacggcaccaagatggttggcggcgtaactccgggcaaaggcggcaccgagcacttgggcctgccagtgttcaacaccgtgaaagacgctgtagctgccactggcgccaccgccagcgtgatctacgttccagctcctttctgcaaggactccatcctggaagcggcattcggcggcatcaagctgatcgtctgcatcaccgaaggcattcctaccctggacatgctggacgctaaagttaagtgcgacgagctgggcgtagtcctgatcggccctaactgcccaggcgtgatcactccaggcgaatgcaagatcggcatcatgccaggtcacattcacttgccaggtaaagtcggtatcgtttcccgttccggcaccctgacctacgaagcggtcaagcaaactactgacgccggtttcggtcagtcgacttgcgtcggcatcggcggtgacccgatcccaggctccaacttcatcgacatcctgaagctgttccaggaagacccgaagaccgaagcgatcgtgatgatcggtgagatcggcggttcggctgaagaagaagcggctgcctacatcaaggcacacgtgaccaagccggttgtttcctacatcgctggtgtgactgcccctgcgggcaagcgcatgggccatgctggcgcaatcatctctggcggcaaaggcactgcagacgagaaattcgctgcgctgcaagacgcaggcgttaaaaccgtgcgttcgctggcagacatcggcaaggccctggccgagctgaccggttgggctgtcaagtaagctctatgcttagttgacgccgtaccaacacaaaggccaccttcgggtggtctttgtgcgttccggggttaagtaaagatcaaaatgtgggagggggcttgcccccgattgcagtgggtccgtcaataaatacagtgactgacacgccgccatcgggggcaagccccctcccacatttgcctgtattgccaaattaggtatgaaaatgcgacatgcagatgtcgcttatcggacagtccgccccgcaacagtgcgttcgtcagccaatttctgtaccctagccgcctctttatgcgtgcgcatcccaaaaggaagccccgcgctagaccggtcggctcccataagggccggcagcatttccctcatccatagggaatccctctctaaattccgattcagtagtgtggtatttcctcaaatgaaagtgttgaaaagccaggacatcctggcgctgggctttatgacttttgccctgttcgtgggcgccggcaacatcatcttcccgcctatcgttggtttgcagtccgggcctcatgtctggatggcagcgttgggcttcctgatcaccgccgtgggtttgccggtggtcaccgtgatcgccctggccaaggtcggtggtggcatggacgcgttgagcagcccgatcggcaagatcgccggtggcctgctggcggcggcggcgtatctggcggtagggccgctgttcgctaccccgcgtaccgcgaccgtgtccttcgaagtgggcctggcgccgctgaccggcgagagcccgctggcgctgttcctctacagctcggtgtacttcctggtggtgttctttgtctccctgtacccaggtcggctgctggacaccgtgggtcgcttcctggcgccgctgaagatcatcgccctggccatcctcggcatcgccgcgtttgccttgccggccggtgacgtgggcgtcgctaccccggaatatgtggccgcaccgttttcccaaggctttatccagggttacctgaccatggataccctgggcgcgctggtgttcggcatcgtgatcgtcaacgcgattcgctcccgtggcgtcgagtcgccgaagctgatcacccgttacgccatcattgcgggcctgattgccggcgtgggcctggccctggtgtacttcagcctgttccgcctgggttcgggcagccatgccgtggctgccggtgccacaaacggtgctgcggtgctgcacgcctatgtgcaacacacctttggatccctgggcagcggcttcctggccgtgctgatttccctggcgtgcctggtgactgcggtgggcctgacctgtgcctgcgccgagtacttcagcaaaatcctgccgctgtcctacaagaccctggtggtgatcctggcgctgttctcgttgttcgtgtcgaacctgggcctgaccaagctgattgccttctcgatcccggtgctgaccgcgatctacccgccgtgcatcgtgctggtggcgctgagcttctgcaaagacttctggcaggagcagggccgcatcgttggtccggtgatgctggtgtcgttcatctttggctgcatcgatgcgctcaagggcgctggcttggcgggttggatgccttcgcccctggcgaacctgccgttgagcgaccagggcctggcctggctggtgccgtcggtgatgacgctggtcgtggcgttcggggttgatcggatgctcggcaagcgcagcgaagctatcgcataaacccatgtttcccgctgtactgaaatgccccgtatcaatcgatatggggctttttttatgggtgaacggcagtgtctttttctgtgcactaacgtcgaactgacgcaaaagcgtttcagccctctttctgcaaaggacccgcatgtcgttcatcgaaaccaatcagatccacctgcttgccgccctgtggttcgccctttgctggggcggctatacccgatacgccatttggaaggcccgtgacacggcctgcctcgccagcgtgctgcatctgtaccgcgaagactggatgcgccgcatgctgctgcgcgacaaccgcatcgccgacgccagtgtgatcggcaacctcgagcgcaacgcttcgttctttgcctccagcacgctgatcatcctcgccggcattctcacggtgttgggtgcttcagagcgggcagtgtcgttgctggcggacataccgatggtgcaacaggcgtcccaaggtatgtcggagatcaagctgctgtgcctggcactggtgttcgtctatgcgttctttacattcagttggtgcatgcgccagtacaacttcgcggcggtgctggtcggctcggcgccgatgatcggcgagcgggatgtgtcggagcaggagcgcaaggcatttgctctacgtgcggcgcgagtcatctccatggcggccaaccagttcaactttggcctgcgttcttattacttcggcatgaccatgctggcgtggtttgtcagcccctggctattcatgttgatgagcgctggggtagtgttggtgctgtatcggcgggagtttcattccgacgtgctgcaagtgatggtgtttacccagacggatacaccgccgtcggaaccggttaaagaagcggtttgatcaacccctcaagtaaaaaacgccaggcaaagtaaagcccgctatctaagcgggctttctttttgcagcgaagctacttcaaaccgcggtctcaagaaccggtagcaggtgctgcttcttttgcggcggcttggttcgattcagcctgagctttggcagcttcggcgttttctttcgcagcgtcgttcactttatcctgagccttggccatatctttctgagcttgctcagaatgggctgcagcgtcttgggctttgtcttcggatttcttgtcgcaggcagccagaccgagggcagcggccagcatcatggaaatagctaaagtcttgcgcatgggtgtttctccttattgaagatatctactggcctttcgagcatggcggttcggcattagttccttttattcggtagatatataaatcgctgactaacaggaacttttgccctggcgaccattctgcggatcaacactaataagagtctggaacgaatgagcgaaaatcccctgttagagcgtgcgaagcgctttgtatcggccttgcgccactgtcaggtgctgggcattaccgctcatcaggccagcgaggagggcatcacgctgatcatgccgtatgcgccccatctggtcggcgatccccaatcgggggtgattcacggtggcgcgctgacctccctgatggacaccgcctgcggcatggccaccctgtgcgtattgccggaattcgaggtgtgcccgaccctcgacctgcgcgtcgactacatgcatcctgccaccccacacaaaccggtgtacggcttcgcccaatgctaccgggtgaccaccgacgtgatcttcacccgaggcttcgcctaccaggatgacccgcagcaacccatcgcccatgtcgtcggtacattcatgcgcatgggcaaacgcctcaagggcgcacaaggactgggcagcacgatcaagggagagcaggcatgacgcaccgattcaagacccgcctggagcaggcccacgggcgcggcgattacgcagcgctgctcaacctgatcccctatgccaagttgatcggcatcgaatgcacccggctgggagatgagctgctgtttcgcctgccggccaacaaggacaatattggtaacccgatattgccggcgctgcacggcggggtgatcgcgggtttcatggaactgtcggcggcgctgcacctgctggtgttcaccggcgcaccgggcatcccgaaaatcatcgatttctccctggattacctgcgcgccggtcaatttcgcgacacttacgccaaatgccaggtatggcgccagggccggcgagtggcgaacgtggcgatcaccgcctggcagagcacggcggcagagcccatcgccacggcccgcgcgcattttaagatcgaggaaccaggccacccttgaaatcctgctcttagcccccaactttgatgacaacccgccgccaaccctctagggcgcggccactgccatccaattggagtttgatgaccatgagtgtggaaactcaaaaggaaaccctgggcttccagaccgaggtgaagcaactgctgcacctcatgatccattcgctgtattccaacaaggaaatcttccttcgcgaattgatctcgaacgcctctgacgctgtcgacaaattacgtttcgaagccctgtccaagcctgagttgctggaaggtggcgccgaactgaaaattcgtgtgagcttcgacaaggacgccaagaccgtcacgatcgaagacaacggtatcggcatgagccgtgacgatgcgatcgcccacctgggcaccatcgccaagtccggcaccgccgatttcatgaaaaacctctcgggcgaccagaagaaagattcgcacctgatcggtcaattcggcgtgggcttctattcggcctttatcgttgccgaccaggttgaagtgttcagccgccgtgccggcctcgacgccagcgaaggcgtgcactggtcttccaaaggcgagggcgaattcgagatcgccaccgtcgacaaggctgaccgtggcacccgtatcgtgctgcacctgaagtccggtgaagacgaattcgccgatggctggcgcctgcgcaatatcgtcaagaagtactccgaccacatcgccctgccgatcgaactgccgaaagaacaagcggcagccgaaggcgaagacgcgcctgcccaggaatgggaagtggtcaaccgcgccagcgcgctgtggacccgtccgcgtaccgagatcaaggacgaggaataccaggagttctacaagcacatcggtcatgactacgaaaacccactgagctggagccacaacaaggtcgaaggcaagctggaatacagctcgctgctctacgtgcctgcccgtgctccgttcgacctgtaccagcgtgaagcgccaaaaggcctgaaactctacgtacagcgcgtgttcgtgatggaccaggcggaatcgttcctgccgctgtacctgcgcttcatcaagggtgtggtcgactccaacgacctgtcgctgaacgtgtcgcgggaaatcctgcagaaagacccgatcatcgattccatgaagtcggcgctgaccaaacgcgtgctcgacatgctggaaaaactggcgaagaacgagcctgagcaatacaagggcttctggaaaaacttcggccaggtcatgaaagaaggcccggcggaagatttcgccaacaaggaaaaaatcgccggcctgctgcgttttgcctcgacgcatgaagagggtggcgagcaggtggtttctctggccgagtacctggcccgcgccaaggaaggtcaggacaagatctactacctcaccggcgaaacctacgcccaggtcaagaacagcccgcacctggaagtcttccgcaagaaaggcattgaagtgctgctgctgaccgaccgtatcgatgagtggctgatgagctacctcaacgagttcgacggcaaatccttcgtcgacgtggcccgtggtgacctggacctgggtaacctggactccgaagaagagaagaaagaagccgaagaagtcgccaagtccaaagaaggcctggtcgagcggatcaaggcttccctgggcgaggctgtcagcgaagtgcgcgtgtcgcaccgcctgaccgactccccggcgatcctggccattggcgagcaggacctgggcatgcagatgcgccagatcctcgaagccagcgggcagaaggttccggactccaagccgatcttcgagttcaacccggctcacccgctgatcgagaaactcgacggtgagcagagcgaagagcggtttggcgacctgtcgcacatcctcttcgaccaggcggccctggccgccggcgacagcctgaaagacccggccgcctatgtgcgccgcctgaacaagctgttggttgaactgtcggtttgaccctgacgtagaaaaacccgcttcggcgggttttttcgttctaacgcacctcaactggagtaaatgatgagccaagtcactgtacgttccgtggtctatcagattgatggccagtcctacgaaagccgcctggcgttcgatgccagccacaagggcccgttgccggggttgttgatggcgccgaactggatgggggtgagtgcgggtgccgaagagatcgccaaaagtgtggccggccagggctacgtggtactgatcgccgacctgtacgggcagaccgtacgcccgtcgaatggcgatgaagccggtgcggcgatgatgccgctgaagaatgacaacccgaagctgctcaaactcatgcaagcggcgtttgagcaactgcagggccaggccgaggtggatacctcgaagcttgcgaccttcggcttctgctttggcggcttctgctcgctggagctggcacgtaccggtgcaccattgaaggcggccgtctcgttccacggcaccattgacacccagaacccggacggcgccaagcatatcaagggttcagtattggtcctgcacggtgcttccgacccattggtgccgaaggcgcaactgccggcattcgaagatgaaatgaacgcggccggcgtggattggcaattgctgagctatggcggcgcggtgcattccttcactgacccccatgcgaatgtgccgggcaagatgatgtacgacgccaagaccgccaagcgcgcgttccagtcgatgcacaacttgctggatgaggtgttcaagggctgattcttcagcgcctgtccgggcctaatcgggggcaagccccctcccacacttggatgcaatcactgatcaaatgtgggagggggcttgccctcgatggctatctcactggcaactcaatcctttcagactcccccggcaccgtcggccactccccggccgcccacctctgcctggcctgctcgatcaccgcggggtcactcgcgacaaaattccaattgatccgccgtggcccatcaagcggcgcgccgccaaacaccaccaagtggcaatcactgtccgcaaacaatgtcatctcctgcccggccggcaataccactaggctgtggacttcaagcgcctcgccgtccaactgaccgtcaccttccagtacatacacggcccgttcctcatgctcatcaggcaacagtagggttgtagccgtctgcatccgcacctcggcatacaaggtgggcgacagcaccggcaccggtgacttgaggcagaacccgttgcccgcgatcaggcgtatctgcacgcccaggttgtcactcaccggcaggctcgccgccgggtgatggctgtaatgccccggccccgtctcgtggtctttgggtgacgccaaccatacttgcagcccatgcaggctgaacccgctggccttgagcgcctcgggtgtgcgttcgacgtgggcaatcgcgctgccggcggtcatccagctcacatcacccacctgcaccacctggtccgagcccaggctgtccttgtgctgcaatgcgccctcaaacagatacgtgagggtcgacagcccgatatgcgggtgttggcggatattcatgccgtgacccggcgcgtagcgggtcagcagcatatggtcgaaaaacacaaaaggcccgacgctgcggcattcccgcgacggcagcgggcgcaggatcggttggccttcgacgtcttcggggcgagggcggatcacggtgagggtggtcatggtgcgtcccagtctgagcgggttggatgctgctgagcataacccgctccacgggaggttgccgctattggctgaaggcgccttccgacagtttggtgtcgatgctgatctcggcggtggtcatcagcttgtgcaccgggcagcgatctgccacgcggtgcagctcatcgcgctgttcgtcggtgagcacgcccttgagggtgagcttgacgttgagtgtgtatttgcccttttgctcttcggcggcgtcatgggtgacctccacggtcacgccggtgagggggataccttttttctgggcgtagagcttgagggtcagggctttgcacgaggccagggcggcgtcgaagtagtcatggggggagggcgccgaatcgtcgccgccgaggctcttgggcaggtcggtgaacaactcatggttgtcgatgttgaggctgtggcgaaagttgtcctggttcagggtgtttacggtaacaggcatggcaaacctcacagggtggcaggatgaaggtcatgcagttatagagcatgctggcacttcgatgttccgcgttttttgccggatgaaccctggcaaggcgttcaaggtctacccgtatcagcccctatcgaggtgttaccgtgccctggactcgcctgacccttgccctgttgttcgcctccggcagccttgccgcgcaggcccgcgactatgcctacagcgatgcgcacctgcattacgtggatttcttccaggaaactgcaggcatggacaagctgctcaaggccatggccgacaatcgcatcgaacacgtgatgatttccggtattccggtcgcgaagaaatggcacgaggacgaacccaagcgcccgcgctattacgccggtgacgacgccgatgcctattggtacagcgccaccgacgtgatcgtggccgcagcggtcaacaaactgacccctgagcagcgcgagcattttcatccgttcctgtccggcttcaaccccaacgacaagaactcggacgcccatatccagcgcatgctcgatctcaacccaggcctgtggcagggcatcggcgaggtttttacccgtcatgacgacctcacggccatcaccgccggcgacacaccacgggccaataacgaagccatgacccgcatttatcacctggcggcggaaaatgacctgccggtgatgctgcactccaatatcacctccaagcgcgagcgcaacccgctgtacctggctgaagtcgaagagccactgcgcaaccacccacacacccgttttatctgggcccatggcggcaccagcaaggaaatccaccgtcaccaggtgcagatggactttttgctgcccaccttgagccgcatgctggaggcgtaccccaacctgtacatcgacctgtcctggagcatgcttacgccgtatttgctggatgatagaggccatcctcgtccggagtggataacgctggtggagcgtttcccggagcggttcatgctgggctcggacgtcgtcgggcgtttcaacaagctgggtaaggaaatgcgtcgcttcgagcctttcctcgatgcactgcctgaggacgttgcgcacaaagtggcacgcgacaatttcctggccatcctgcctaaagcccatcgcgatggggcgccacgctgatatcgcgttttgatcttacgcaaaccccagattgcgccgatacctttcaatagccagctgcaattggatgcagcgctggtgattgccagcgcatcggagcagtagacgtcgacaggcgcgaaccagagcagtgcggcgagccaggagttgtcgcggttggcggtggacctgaacacgatggtggcgcggttttcggtgtaggggcgggcgccgaggcggcgctatcgggggcaagccccctcccacctttgatttgtgagtgcattcaaaatgtgggagggggcttgcccccgatgaggccctcccagccactaaaaaatccagcccataaaaaagccccgaaccagtcggggctttttaatgcggtcaagctacaggtcttactgaccctgccagcgtttcagcaccagggtggcgttggtgccaccgaagccgaagctgttgctcatcacggtgtcgatttttgcattctcaacggtcttggtcaggatcggcatatcagccacaaccggatcaatctcatcgatgttggcggagccggccatgaagttgccttccatcatcagcaggcagtagatcgcttcgtgaacgccagcggcgcccagggagtgaccggacaggctcttggtagagctgatggccggggccttgtcgccgaataccgcacgcacgccttccatttccttggcatcgccgaccggagtcgaggtgccgtgggtgttcaggtagtcgattggggtgtccacggtggacatggccatctgcatgcaacggatggcgccttcaccgcttggggcaaccatgtcgtagccgtcggaggtcgcgccgtagccgacgatttccgcgtagatcttggcgccacgggccagagcgtgctccagctcctcgaccaccaccatgccgccaccgccggcaatgacgaaaccgtcacgcttggcgtcgtaggcgcgggaggccttttccggggtttcgttgtactgggtggacagtgcacccatggcgtcgaacaggaacgactggctccaatgctcttcttcaccgccgccggcgaacacgatgtcctgcttgcccagctggatctgctccacggcagtcccgatgcagtgagcactggtggcgcatgcggaggagatcgagtagttcacgcccttgatctggaacggcgtggccagacaggccgaaacggtgctgcccatggtccgtgtgacacggtacgggccaacgcgcttcacgcctttttcgcgcaggatgtccagcgcttccatctggttgagggtcgatgcgccgccggagccggcgatcaggccggtgcgtacgttcgatacctggtcttcgctcaggccggagtcggcgatcgcgtctttcatcgccaggtaggcgtaggcggcagcgtggccgacgaagcgatagatcttgcgatcgatcagttcttcgaggggcaggtcgatggagccggaaacctggctacgcagacccatttcggcatattccgggttgaagcggatgccagggcgacttgcacgcaggttagcggtgacggtctctttgtcattgcccaggcaagaaacaatgcccagaccagtgataacgacgcggcgcatgcggataacccttaaaagttgtcagtggaagtgaatacgccgacccgaaggccttcggcagtatagatctcgcgaccgtcgacgctcaccgaaccatcggcgatggccaggttcagcttgcccttgaggacgcgcttgatctgaatgttgtaggtgactttcttggcggtcggcaggacctggccaaagaacttcacttcgcccgaacccagggcgcgaccgcgacccggcaggccttgccagcccaggaagaaaccgaccagctgccacatggcgtcaaggcccaggcagcccggcatcacagggtcgccttcgaaatggcaggcgaagaaccacaggtccggggtgatatccagctcggcgaccaattcacctttgccgtacttgccaccctcttcgctgatatgggtgatgcgatccaccatcagcatgttcggggcgggcagttgcgcgttacctgggccgaacagctcaccgcgactgcagcgcagcaggtcttcccgagtaaaggcgttttgtttggtcatgcgagctcctcaataatcccatgcggcagggtagggcaaatcttcccgaaccgaatgaagcgttcatgcctcatgtcggcagcctacacgtagactattgcgttgtagtgaaagtcacagcggcaaggcactgaatgtacacttgttcactgaaattttaaaccgggcctgtttataggcccgttcgggtgcctaagactgccgcactttcgtctttcacgccagtcggagttggctgatggcgcggcgctattgcacccagcgctgcaggatttgctgcaaatccgtgcgtttgaacggcttggccaggtaatcgttcattccggctgccaggcaggcttcacggtcgccctgcaacgcgttggcagtcagggcgatgatcggcaggtcggcgcagccgggcagttggcggatcttgcgggtggcctcgtagccgtcgatcagcggcagccggcaatccatcaggatcgcggtgaaaatcaggctctcggcactgcggatcgcctcggcaccgtcggtggccaggctcacttcaaagccgaggctgcgcaacatggcttcgaccacggtgcggttgaccgggttgtcctctaccagcaatacatggcggccatcgccggcgttggctttgccgtcggcgccttgcgcgatggccggtacgctctgctggtcgatggccaggggaatttccagggtaaataccgagccgcggccttcttcactttgcgcgcgcagggtgccgcccatgcgttcggccagggtacgggcgatgggcaggcccaggccggtgccgccgtaacgccttgaaatggaactgtcggcttgctggaacgcatcgaacatcaactccaggcgttcggcggaaatcccgatgccgctgtcgcgcacggtgcaggtgaaccacaccagttcatggtcgagggtctgccaatggggttcgacgctgacgctgccctgctcggtgaacttcagcgcgttgccgatcaggttcaccaggatctggcggattcgcgtcggatcgccctgcacgcgcaaagcgtccaaccctggtggaatcgacagtttcaacgccaacccgcgctgctgggcgctgtgctggaacgcctgggcgcagctgttgatcaggtccgccaggttgaacggaatatgctccagctccagggccgcgcgttcgatgcgcgagaagtcgaggatgtcgttgatgaccttgagcaagtgctcggtggattcggaggccagcgccgcgtactcggtctgctcctcggtcatctcggtggtttccagcaattgcaacatgcccagcacgccgttcatgggcgtgcgcagttcatggctcatcatcgccaggaaatccgacttggcgttgttggcgcgctcggcctcttcgcgggtctggatcaactgggccatggcctgctgctgttcgcggctggcctggttgaggccttcggccaggttattgatgtgtcgcgacaggtcgcccaattccgagtcgtccacgatcggcaacggcgtcttgtagtcaccttgctggatggcttttacggcgtggcccatggcgctgatcggctgcgacaggctggcggccaggcgccgcgcgagcaggaaggtaaacagcagggcgaacagcgccaggatgccggccttgaacaggatctcctgctggcgctggctgaatgcgtcgttggacatgccgacgatcacccggcccaggtagtcggcccgcggtgctttgggttcgttgaggttgtcctggaaaaaatcattgcccaactggatgtgttgcaggcgaatcggtgcctggaacactttcaccgacagcgaacggtcgtgtttttccgacggttgctcgacatacaccaggatgttctcgctgctgtcctggatctccaggaaccgcacatggggcgtagcgagcgtggcgcgcagcaggctgtcgagcacttcgttgttgccggagatcaccccgtactcggtggcgggcgccagttggttggcgatcaactggccggtgtggtccagttcctggcgcaagtcctggatccgcacgaaggtgaaaaagctgatcaacagcaacgtcagcaacagcgccgggcccagggtgatgagctgggtgcgggtgttgatgtcccaacgacggcgcaaggtcatgggcgtttttctccttcggccaagcggatcgcgacgccggcttcgtccacctgttcgatccccagtgagcgcgcgacttgcgggttgcccacgactttgaagtgttccgggtacagcgagcgcggccagttggccggcgggtggtcgagcagacggtctagcacggccagccagtcggcctggtcgctgtaggtactggccaggctgccggcccgcacaaagcctgcattcgggcccaccagcggcaattgctgggcatagctgctcagcaacaggttcttcgcggttttcgggttgtacaactgcgggtcatcgaggccgagcagcacgtcactgttcctgaacaggttttgcagcgggcggctgtcattaatgttgtcccagagctgtggcacgatttccaggccgagcggtgtggcgtgttggcgcagttcgggcagcaggaactcactgtcggcgccatacagcacgccgatgcgccgcgcctggggcaggatggcggcgatcaggcgcagttggcgctccagcggtgggtcgctccacagtaggctgatgtgcgggtgaggtgtgctgcccaggcgttgatgggcctgtaaccgactgatacgcagcaccagggtcggcgggccctgggtttcctgcaggcgccagtcgaggccgggcaggtcgagcaggatcaggcgtgtgttggccggcagtcgaccaggggctggcaagtttttgagtggtgtgaaggtgacgcggtcttcggggcgttgctgggccagggcttgggcgaaggcctgcacgccgacgccgtcttcggcggcggtcaacaggatctcggcactccaggccggcgcggcaaacagcaggcacgcgagcagcagaatgcgtcgccagagcgtgtggataaaaaagcaggtcatccgtgacgagtcgcccatgtcagaactctagctccgcgctgaagtagagcacatggcgatggtcataattgttatcggcccaggtggtgggctggtgatcaaggcgttgttgcaacatgccggccagctccacgttggctttgcccagggcaatgcgcttggccacccgcaggtcgacccgttcgaagcgatattggttgagtgcgtcatcgccgtagtagaacaacgcgctggaccagccttggccccattcgcgcaaccaaccggcagagccactgttgcgcgcggtctgtgctttgtcccgcgggttgctgctggtggcatcgacgtaagcataggtcagccgcaggcggtcggcgttgctcacgcgccagtcgaactgggattcggcgccggtgaagcgtgcgctgttggcgttgctggcaatgtactggttattgcgcagcggcgaactgatcatgtcggtgatttcgtcgtagaacagtttcacgtccatgttcagcccgatgtcggcaaagaagccgttgtaccccaattcccgcgacttcatcatctctttatcgaggttgcccggcccccgcgtctttacgaagtattgcccggtggtctgaccgtaggccggggagctgaggttggtgacgcgataactccagttgacgttgttctcgaacatgtccggcgagcggatggcttcggagtacaccgcgcgcaagccatggcgcgggttgatcaggtagttgaccgccacccgtggcgtgagcgagttgccgctcaggtgcgtgtcctcatacatggcgccgccttgcagcagccaatgttcgctggcgcgccattccaactggccgaacaggcgccaggtggtgtcgtccagggtgccgttgaagtaggtgtcggagtcggcgcggtcgtagcggtaattcatgccgctgaccaggcgcaggctgtcggagaggctgagggtatcctggatttccagatcgtagcggctttcgcgggtgctctggtcgatgtctccgcacacgctctggttggcgccgttacgccattggtccagcacctggttggccagcgcttgctcggcggcgctgcccggtggcgcggtgccttggctgtaggtgtccatgtgccgggccagcagttcggcgtagttggggttcatctgccacagttgggtcaattccgggctgaacgacactttggcgtcgcaggccttccagatttggcggcggtcccactgctgggccgagccctggatgtacaggctgtgctcggggttgaaatcaaaattccagcgcagcgagccggcgtagtccttggccgtgacgtcggagttgttgccaccttcggtaatcccggcgaataccgggctgtaggtatacggacgttggttggtgccttccttcgcatccagttgccagtcgatgctctgctgcgcgttcaacgtctggctaactgccaggctgaagcggttgaggcgccgcccgtcgcggcggtcggcgccagcggcgtcgctgtcgaagccatcgtcctgctggccggacagcgacaggcgcaaatcgccggtttcccagccgacgccctggctggcatagaagtcgttgatgccacgttcgccacgcaccaccttgacccgcgtaccgtggctgttggcgggcgagcgcgtgaggatgttgaccaccgccatcaaggcattggcgccgtagctgacggtgttggggccgcggaacacttcgatgcgctcgatatcttccatggccaccggaatgtcgctccagtccacggtggccaggcccgcacggtacaccgagcggccgtcgatcagcacctgcatgcgccgcgcatcgctggcgctggtgccgtggtagttcaccgccgcctggttgccggaggtgtagccgaccatcatccccggcaccaggcgcagcaactcgctgatatcccgcgcgccgctggccttgatcagctcgctgtcgatcacggtcatgctgccgggcacggcggcggccgattgcttgaggcgtgtggcggtcaacacctggggcaatggctggctgtcgaggaacaggtcgtcggccatgacaggcgcactgcacagcagcatcaaccacagagatgaacggggaggagggcccaaatacacggcacggccttgataattacggatagccgcccatgttaactgaggtggggccatttgccagtcgcaggacttgcaattacttcatgtaagtgtggcattttccgacaagcgcacgaattgatacgggggctggccgccggcgggtcggcccgtataatgccgccatcgccactggtatggattaacggattgcatatgactgaacagcgccctatcgcggtcctgggaggcggaagttttggtaccgccgtggctaacctgctggccgagaatggtcacgctgtgcgccagtggatgcgcgatcccgaacaggccgaggccattcgggtgcaccgggaaaatccgcgttacctcaaaggcatcaagattcatccggcggtcgagccggtcactgacctgctggaaaccctcacggcctgcgacctgtgcttcgtcgcgctgccgtccagcgccttgcgctcggtgctggcgccccacgccgaacgcctggcgggcaagctgctggtcagcctgaccaagggcatcgaggcgcagaccttcaagctgatgagcgaaatcctcgaagagatcgccccccaggcgcgtattggcgtgctgtccgggccgaacctggcgcgggaagtggccgagcacgcactgaccgccaccgtagtcgccagtgaagacgaagaactctgcgaacgggtccaggccgtgttgcacggtcgtaccttccgggtctacgccagcagcgaccgctttggcgtcgagctgggcggtgcgctgaaaaacgtctacgcgatcatcgccggcatggccgtggcgctgggcatgggcgagaacaccaaaagcatgttgatcacccgcgccctggccgagatgacccgctttgcggtgaaccagggcgccaacccgatgaccttcctcgggctggcgggcgtgggcgacctgatcgtcacgtgctcctcgccgaaaagtcgcaactatcaagtcgggttcgccctgggccagggcctgagccttgaggatgcagtcacgcgcctgggcgaagtggccgagggcgtcaataccctcaaggtgctcaaggccaaggcccaggaagctggcgtgtacatgccgttggtcgccgggctgcacgcgatcctgtttgaagggcgcaccttgaaccaggtcatcgagttgctgatgcgcgccgagcccaagaccgatgtcgactttatttccaccagtggtttcaactgaggaacgcgtcatgaacgatccgaaagcagcccccaagtacgaatccattgccctgcgcatcctgtggatgctggtgtttgccctggtttggcaagtggcgcagttcctgctcggcgcgctggtggtggtgcaactgatctaccgcctggtctacggcgccccgaacctgggcctgatgaacttcggcgacagcctcagccagttcctggcgcagatcggccgtttcggcagcttccataccgagcaaaagccgtggccgtttgctgactggccgaccccgcttgcgcctgagggcgaagccgcccacagcgtgccgccggcaccgcacccggtgcgtgatgaagagccgaaactgtgaagttgtggatactgcgccacggcgaggccgaagggcatgcgcgcaccgatgccgaacgcaacctcaccgagcacggccgtggcgaagtgttgcgcagtgctgcgcacctgatcggccagcccctcagcgcgatcatcgccagcccttacgtacgggcgcagcagaccgcgcacctggtgcgtgatgcgttgggcttcgagccggagatccgcacggtgccgtggctgacccccgatggcaacccgttgaaggtgctggaaaaactcgacaccgacgacaatgtgctgctggtcagccatcagcctctggtcggcagcctgatcagcttcctgcagcacggccaccagcgccagccgcagccgatgtacaccgctagcctggcggaactagagggggatttcccgctggcggggctgatgagcctggtcagcgtgaagaatccgtaggctttatcgctgctttgtgtgtgctatatagtcaaccaagcaagtgcttggttggctatcgtcggaccacaaaggagcgcgtcccatgcccgtcgcatttcgattgccgttgcaggtgtttttcgaacgtgaagcgcggcacccgcgccagacctttctggtgcagcccattggcggcggcgaggtgcaacgcctcacttggggcgaagccggccatcaggcccgttgcgccgcgcactggctgcgcgcccgagagctgcccccaggctcgcacattgccctgatctcgaaaaactgcgcgcactggatcattgccgacctggcgatctggatggccgggcatgtctcggtgccgctgtatcccaacctcactgccgactccgtggcgcatgtgctcagccattccgaggcggcgctgacgtttatcggcaagctcgacgactggcccgccatggggcccggcgtgccgtccaatgtcccgaccatcagcttgccgctgtgcccaaccggcgcgttcgatttcagttgggccgacctgcagggctgttcgccgatccaggacgacccgctgccggccgctacggacctggccaccattatctatacctccggcaccaccggcctgcccaagggcgtgatgcacagcttcggcgcgctggggtttgccgccacccgtggcaccgagttgttcgggttgggggagggcgaccgcctgttgtcctacctgccgctgtgccatgtggccgagcgcatgtttgtggaaatggcggcgatctacaccgggcagacggtgtttttcgccgaaagcctggagacgtttctgaccgacctgcgcagggcgcggccgaccgcgctgtttggcgtaccgcgtatctggaccaaattccagatgggcgtctacgccaaaatctcggcaaaacgcctcgataccctgctgcgcctgcccttcatcggcaagcgcgtgggccgcaaggtgctcgccggcctgggcctggatgcgttgcgcatcgcgctgtccggggcggcgccggtgcccgaggcgctgctgcgctggtatcaacgcctgggcctggacgtgcttgaggtgtatggcatgaccgagagttgcggttactcccatgtgtgtcgccccggccagcagaccctcggctggatcggcctgccgtgccccggtgttgaggtgcgcatcgatcctgcgggcgaagtgcaagtgcgcagcggtgcgaccatgctcggctactacaaggacccgctgaaaaccgccgagacgatcaccgccgacggcttcctgcgcaccggtgacaagggcgagcaggctgccgacggccggctgcgcctgaccggacgcctcaaggagatcttcaagaccagcaaaggcaagtacgtggccccggcgccgattgagaaccgcctgtccgaacatgcgcgcatcgaacaggtgtgcgtggtgggcgatggcctgaccgcaccgatggggctgtgcgtgttgtcggcaatcagtgaggacccgcatgcgctgcgcagcagccttgaacgctggctggagcaggtcaatcaagcattggacaaacatgaacgcctgcgccagttagtggtggtgaaagacaactgggcggtggaaaacggcttcttgaccccgacgttcaagatcaaacgcaacgtgatcgaatcgacctacggtgaacatttccagacgtggagcgagcgttccgaaaccgttctgtggcaggattagggccatcataaaaccaacaaggacatccgcatgagcctgtggcgcacgcaaccgaacatcgaccaactcaatgcgatccagaaaaacaccattggtgaactgctggatatccgttttgaacgcttcgacgacgaatcgctgaccgccagcatggtggtcgaccatcgtacccaccagccctacggcttgttgcatggcggcgcatcggtggtcctcgccgagagcgtcggctccatggccgcctacctgtgtatcgatgcgagcaagttctattgcgtgggcctggagatcaatgccaaccacctgcgcggcgtgcgcagcgggcgggtgacggcagtggccagggcgatccatatcggccgcaccacccaggtgtgggacattcgcctgaccagcgacgacggcaaggccaattgcgtgtcgcgcctgaccatggcggtggtgccgctgggcgagaacccgccggcgcgataggcgtggcgtgagtgtcatcattcctggcagttacagtcattgctgtggcggtcggggctggtgacaatcaatctctgtttttgtcgatggatccggtatgtcgcagcatgtgtttttcgcccacgccaatggtttcccctcggccacctacggcaagctgtttgccgccctggccccggaatatgcagtggcgcacttgccgcagcacggccacgaccccaggtttccggtggacgataactggcagaacctggtggatgagctgatccaccacttggagcagcagccggaaccggtgtggggcgtggggcattccctcggtggcgtgttgcatctgcacgcggccatgcgttgcccgcagttgtatcgcggggtggtcatgctcgattcgccggtgctgacccgcgccgaccgctgggtgatccgcgcggccaagcgcttcggttttatcgatcgcctgaccccggccggccgtaccctgggccgtcgcgaggagttcagcgacctggaagcggcacgccgttacttcgccggcaagaccctgtttcgtggctttgatcccgaatgcttcgatgcctacctgcaacatggcctgcagcaagtgggcgatcgcctgcgcctgcgcttcgacccggccaccgaaatcagcatctaccggggcgtgcctcacaccagtcccggccaggtgcgccagatgaaggtgccgttggcggtggtgcgcggccgccagagccgggtggtgatgcgtcaccacgccagcggcgtcggtcgcctgcccctgggcgaaatgctcaccatgcccggcggccacatgttccctcttgaacgcccccaggacaccgcgaccttgatcaagagcctgttttcccgctgggaagcccgcgagcgcagttgcgcatgagcacaccggtcgaagaagtgcgcctgagcctgccgcatatcgaattggcggcccatctgttcgggcccgaggacggtttgccggtgatcgcgctgcatggctggctggacaacgccaacagctttgcgcggctggcgccgaaacttcaggggttgcgcatcgttgcactggacatggccgggcatgggcattcggcgcatcgtcctatcggcgccggttacgccttgtgggattacgtgtacgacgtgctgcaagtcgccgaacagctgggatggaaacgttttgcattacttggccactccctcggcgccatcgtttccctggtattggccggtgcgctgccggagcgcgtgacgcacctcggattgatcgacggggtgatcccgccgaccgccagcggtgaccacgccgccgagcggctgggcatggcgttgcaggcgcaattgaacctgcaggacaagcgcaagccggtctacaacaccctggatcgagcggttgaggcgcgcatgaaaggtgtggtggcggtcagtcgcgaagccgccgaactgctggcccagcgcggtctgatgccggtgccgggcggttacacctggcgcaccgacagccgcctgaccctggcttcgccgatgcgtctgaccgatgagcaggcgatggctttcgtgcggcgtgtgggctgtcctacacagttggtggtggccgcagacggcatgctggcgaaacattccgaattgctttcccagctaccctttaccgtcaccacgctgccgggaggtcatcatttacacctgaatgacgagcccggcgcggtccttgttgcagactgtttcaatcggttcttctgcgcgccttgacttggggcggtcaactgccgaggctgggcggattgaaagggagtcaaccatgaactacttcaacaccgctgtgacctccgatggccagggctcgttgatcttatgagcgtgcgtaacggatgtatccgtatcctgggcttgagccttctgagcccactggtatttgccgccgacgtaccgggtagccaggacctgcccaccgtggcccgccaggtcgacgcgcaaatcgtcgactaccgtcccgccgaagaaaaagaacgcatctaccccatgggcgccatccgcaagatcagcggccagttgcgttatgaaggccaggccaccgcgcggggccaagccactgccattacctatgagttacctgccgaacacagttccagtgccgcatttactgcgacgcgcgaagcgctgcaggcgaagggcgcgcagttgctgttctggtgccaggcccgggattgcggcgaaagcagcctgtgggctaatgaagtgttcggcaacgccaagttggtcggtgccgacggccagcaggaatacctgctgctgcgcctggcagccccccaggaaaactccctggtggcgctgtatggcatcacccgtggcaaccgccgcgcctatctgcatgtggagcaactggacgccaacgcgccgctggccgacctgctgcccacctccgcgacactgctgcgtgagttgaaaagcaccggcgagctggactttcccgcactgggcggcgagcctgacgacacctggttgaccctgatttcccgtgggttgaatctagataccaccttgcgcgtcagccttaccggcccgaacgccgaagcctggcgccaggccctggtcgacaaaggtgtgcgcgccgcgcgcctggaaaccggctccgctgaaaccaaaggcctgcacctgcatctgatacgctgaccgttacaaggcgaacggacccgcgccgttcgcctaagctctcttcctacagccttcttctagagatactccatgctcaataacgatcgcctactggtgcaaatcctgctgctggtgctgttcggtgccagtttctgggtgatggcgccgttctggtcggcgctgttctggggcgcggtactggcctttgccagttggccgttgatggtcctgctcacccgctggctgggtggtcgcgaatccctggccgccggcatcctgacgttgggttggatgctgctggtggcgctgcccctggtgtggctgggcttcaacctcgcggatcacgtgcgcgatgcgacggcgttgatcaaggatatccaggttgacggcctgccggaggcacctgcctggctcggctcgatccccttagtcggtgagcggctggtggccatgtgggacagcattgaccaacagggcgcggccttgatggtcagcatcaagccctacctggggcaggtcggcaattggttgttggcgcgcagtgcgcaaatcggtggtgggattctagaactgaccctgagcctggtcttcgtgttctttttctaccgggacgggccgcgcctggcgatgtttgttcaccgcctgctggagcgcttgatcggcgagcgtgccggctattacatcgaactggtggccggcaccgtgcagcgcgtggtcaacggcgtgatcggcaccgccgccgcccaggccctgttggcgctgatcggtttcctgatcgccggggtgccgggtgcgctggtgctgggcatcgtcaccttcctgctcagcctgattcccatggggccgccactggtgtggatcccggccacggcgtggctggcctggaagggcgattacacctacgcggtgttcctcggcgtgtggggcacgttcatcatcagtggcgtggacaacgtgctcaagccttacctgatcagccgcggcggcaacctgccgttggtcattgtgctgctcggggtgttcggcggcttgattgcctttggtttcatcggcctgtttatcggcccgaccctgctggcggtggcctacagcctgttgatggattggagtgcgacccaggcccaggggcggcgggaagacaagccgctctagacgcgtggcaaccacatcacggctgtcaaaccacccccgggggtttcttccaggtgcaaccgaccgccgaggcgttccgccgcttccttggaaatcgtcatgcccaggccgaccccgccggagttgcggttgcgtgagccttccaggcgatagaacggttcgaacaccgcctcgcgctggtcggcggcaatcccggggccatggtcgatcacccggatgaccagcgcttcgcggctgtccgccagttcgatgcgtgccgagccggcgtagcgcagggcgttgtcgatcaggttgttgaggcatgatcgcaacgccatcggttgcacttgcagcggtgcgcaggtcccgccgaactgcacatcggcgccctggtcctgggcgttttcgctcatggactcgaccagcgcctgcacgtccagccaatgccgggtttcgctggtgcgttgttcgtgcaggtagctcagggtagcgtcgagcatgccgatcatgtcgtccaggtcctggcgcatctggccttgcagccgggtgtcttcgatctgttccaggcgcagtttcaggcgtgacaacggggtgcgcaggtcatgggagacggccccgagcatgcgcgcgcgttggctgacttgctcgcggatgcgtcgctgcatcaggttaaaggtcgacgccgcttgctgtgcctcacgcgggccagattcatcgaggggcgggctgtcgaggtccaggctcaggcgctcggcggcttcactcaggcgctggatcggccggctcagcagcttggcgccgtaccaggctgcgatgatcaacgagatgaactggaacgtcagtggcaccaccgggccaccaaaccacggtcgcttgtgcctgggcaggtgtttcatcgtgccgtccggctgctcgacaaaggtctcttgaggcggcggtggaggtgggccgtaatagcgaaaccaggaaatggccagcacatgagccagcacaattgccaccagcaacacgccaaacagtcgaccgaacagcgtgttgaaggcgttgcgcatcagccgatgtcccgggcgtcgaacaggtagccttcaccccgcacggtcttgatcaattgaggggccttggggtcatccccgagtttttgccgcaggcgcgacaccagcaagtcgatgctgcgatcaaaggcttcgatggagcggccacgggcggcatccagcagttgttcgcggctcaacacccggcgcggacgttcgatgaacacccacagcaggcggaattccgcattggacagcggcaccaccaggccatcgtcggccaccaattggcgcagcacactgttgaggcgccagttgtcgaagcggatattggcgcgctgttcggtacggtcgtcacgcacacggcgcaggatggtctggatgcgtgctaccagctcacgaggctcgaacggcttggacatatagtcgtcggcgcccagttccaggccgatgatgcggtcggtgggttcgcagcgagcggtgagcatcaggatcgggatatccgattccgcacgcaaccagcggcacagcgacaggccgtcttcgcccggcagcatcaggtcgagcaccaccacgtcgaaggtttcggcctgcatggcctggcgcatcgccgtaccgtcggtcactccgctggcgagaatgccgaagcgggccaggtagtcgatcagcagttcacggatcggcacgtcgtcgtcaacgatcagcgcgcgggtgttccagcgtttgtcgtcggcgatcaccgcgcctttttgctcgtcgttcatagagacggaaggggtatgcatcatgcgatcatctgcctggttgttgcggtcagcataggcgcccagccccatggctggaagtgctggtcggtgggtcgtgcgagcgaggctagccgtggggcgtgttgggggcatgtcgtgaatgtatcagctttgaaataattacctgaaatgcccacccgatggcgcttggtcagtatttaccgatcatcggatcccgcaacgccgtcgcttgcgctacaatccgcgccgatttcgacttgcctgagagcccattccaatgtccgtctgccagactcctatcatcgtcgccctggattaccccactcgtgacgccgcactgaagctggctgaccagttggacccgaagctgtgccgggtcaaggtcggcaaggaactgttcaccagttgcgcggcggaaatcgtcggtacgctgcgtgacaaaggttttgaagtattcctcgacctgaaattccacgatattccgaacaccaccgcgatggcggtcaaggccgccgccgaaatgggcgtgtggatggtcaacgtgcactgctccggcggcctgcgcatgatgagtgcctgccgtgaagtgctggaacagcgcagcggccctaaacctctgctgattggtgtgaccgtgctcaccagcatggagcgcgaagacctggccggtatcggcctggacatcgagccccaggagcaggtactgcgcctggccgccctggcgcaaaaagccggcctggatggcctggtgtgttcggcgctggaagcccaggccctgaaaaccgcgcacccgtcgctgcaactggtgaccccaggcattcgtccggcgggcagtgcccaggatgaccagcgccgtatcctgaccccgcgccaggcgttggatgcaggttccgattacctggtgatcggtcgcccgatcagccaggcggccgatccggccaaggcattggcggcagtcgtcgctgagattgcctgacacttgaaagcgaacacagtaaaaaatgtgggagggggcttgcccccgatgacgattgctcagccaaaaatgtagtggctgacccaccgctatcgggggcaagccccctcccacattttgctctgcggtgtgtcagctgaccttgagcaccaacttcccgaagttctcaccgttgaacaacttcatcagcgtttccgggaacgtctccagcccctccacgatatcttccttgctcttgagcttgccctgggccatccagccggccatttcctgcccggcagcggcaaagcctgcggcgtgatccatcaccacaaacccttccatgcgcgcgcgattgaccagcaatgacaagtagttggccggacctttcacggcttccttgttgttgtactggctgatggcgccgcagatcactacgcgcgccttcaatgccaggcggctgagcacggcgtcgaggatatcgccgccgacgttatcgaaatacacatccacgcccttggggcactcgcgcttgagtgcggcaggcacgtcttcgcttttgtaatcgatagcggcatcgaagcccagttcatctaccaggaacttgcacttgtcggcgccgccggcaatgcccaccacacggcagcccttgagcttggcgatctgcccggcaatgctgcccacggcaccggccgcgccggagatcactacggtttcgccggccttcggcgctccggtgtccagcagcgcgaagtaggcggtcatgccggtcatgccgagggccgagagataacggggcaggggcgccagttttggatcgaccttgtagaaaccacgcggctcgcccaggaagtaatcctgcacgcccagggcgccgttgacgtagtccccgaccgcgaatttcgggttgttcgaggcaatcactttgcccacgcccagcgcgcgcatcacttcaccgatgccgactggcgggatataggacttgccttcattcatccagccgcgcatggccgggtcgagggacaggtattcattgcgcaccagcacctggccgtcctggggcgtgcccaccgggacttcctgataggtgaaggtgtcccgggtggccgcgccgaccgggcgcttggcgagcaggaattggcggttggtctgggcgatcatggcagcgactcttctggaaatgaacctgaagtgatagaccctgaacgggccgggagcaaggttcaccgagcgtgcgaatgccggtcgataggtgttgctgatagtcaggtggcgcctcttatcactgtgatgcatgcagcttcaaccggccttttgatagtgctgacgcgcctggcgctgcgttggctagactcgatccacgactttccctcacaggacatcctcatgagcatgacgttttccggccaggtcgccctggtgaccggcgctgccgccggtatcggccgcgctaccgcactcgcgttcgccgccgaagggttgaaggtggtggtcgctgacctggacgttgcgggcggcgaaggcaccgtcgcactgatccaccaggctggcggcgaagcgctgttcgtgcgctgcaacgtcacgctggaagcggatgtgcagcaattgatggcccagaccctcgccgcctatggccgcctggactacgccttcaataatgccgggatcgagatcgagaagggcaagctggcggatgggaccctggacgagtttgacgccatcatgggcgtcaacgtcaaaggcgtgtggttgtgcatgaagcatcaattgccactgctgttggcccggggcggtggggcgatcgtcaacaccgcgtcggtcgcggggctgggcgcggcgccgaagatgagcatttatgccgcgtccaagcatgcggtgatcggcctgaccaagtcggcggccattgagtatgcgaagaagaacattcgcgtcaatgcggtctgcccggccgtgatcgataccgatatgttccggcgtgcctatgaagccgacccgcgcaaggccgaatttgccgccgccatgcacccggtcgggcgcatcggcaaggtcgaggaaatcgccagcgcggtgctgtacctgtgcagcgatggtgcggcctttactaccggtcacgccttggcagtggacggtggcgcgacggctatctaggaccgcaggtcgccctccattcgaaaaggtcatggagggtgtgaggtttttccatagctggcacggtgccttgtcagaatgtgtatcagtaggtaaataacttaataaaatcaatactttaataagaattggcgagcggccgacgtgggcttccgtgcttaactgtctcgggttgaattacagacagttgaagtgagtggcgcatggatttagggatcgatcgacaagcccttgtaccggtggtgcagcaaatcatcagcgcggtggcgcaatggattcgcacgagtggggcgagccctggtacacgcttaccctccgttcgccaggtggctctcgataacctgctcagccagtccagtgtgatcgaggcattcgagcggttggtcgcccagggcctgctggtttcgaaacagggctcgggtttcagcgtggcccagccaccgaccgtgcacgaaagccagtggtacgaaggtgccgagcgggattggggcgccttcgcggataccccgttgggtgagctgaaactgggttgcggctggctgccggatgcctggcgcgaaagcgatgacatcagctacgcgattcgcgaagtcacccgctgcgacacggctgcgctgttcaactacagcaccccattggggctcccggcgttgcgcgagcaattgctcaagcgcctgacccaggcgcacatccccagccaccttgacggcatcctcaccacggcgggcgccagccatgcacaggacctgctgatacgcaccttactcaaggccggtgattgcgtggtggtcgaaacgccggggtacggcaacctttatcggcaactggcattccatggtgtgcaactgctgcaggtgccacgcacccgtggcgggccggacatcccggcgcttgaagccttgcttcagcgttatcggcccaagtgcctgttcatccacagcctgtatcacaaccccaccggttcaagcctgagtcgcaccgtggcggagcgtgtgttggagctggcgcaccgcgagaactttttgattatcgaggaggacgtgttcggtgatctgcaacacgccagttgcacgcgactctcggcgttaccccacggtgaccgggtgatctacgtcgcaagcttttccaagaccctgagcagcgccttgcgcgtgggctatctcagcgccagcacggcgatcatcgcgcaattggccagcctcaagactttgaccggcttcggcacttcgcggtttgccgaggccgtggtggcgacactgctggcaaatggcacctatcgcaagtgggtacagcgtctgcgcaagcggctgagtgcgcaaatggccgcgaccttgcaggtgctggaggatgaggagtgggaggtgttcgccaaccctgccggcgggatgttcgtgtgggcgcggccaggggtgggggatcggtcgcggttgcaggcgtgtgcccggcggctgggggttttgttgtcgccgggggcactgttcagtccaacggatgagcccagtgagtggctgcgaatcaatgtggcctatgctgctgatcaacgggcactggcgttattccgcgccatgggacctgccagatcgacctcgaccattctgaaaacgacgggcgtgtagctttttgccattattgtggcgccaacgacttgtgttcggtgccttgtggttgccaatctcgcttgtgtaaaccgggcttgatggcatctgccattgcaagaggatgcaagtgcaatgatttcggccgtgcaacgacgcttcgccaacctcggtatggcaaaaaaactgggcttgggcttcaccctggtattgctgctgaccgccctggtcgcggcgatcggcgtgtggtccctgcaaactgttggtcagcgcttcgaaggcctcaaggccatgtcgtcgctcaacagcggcttgctcagggtacgcctgatcgagcaggactacgcgttgcatgccgaccccaaggccgtcgacgccctgcatgaaagtgtcgatgccttggccgccctcgcggcgagcctcaaggcccagtcggcggccaacgtgccggtcatgaccgatgtcgaacaggccctggccgcctaccgcaaggcgttcgatgagtttgtcgagctgacccagaccaaggacttggcgttggaaatggcaagttggtcagtgtccagcgtggccaataacctcgatgtgttgcaggccgggctggctgacgacggtgcctatggcctcaaggaaagccagggcaaggagggcgccgagtttatcgagcaggcggggcaggtcagccaggtttcacggctgatgctgcaagccatgaacgaagcccacgtacgtctggaccagagccgcaaggtggacgctgatgacgccgagcaaggcaagatcgagcaggccgaccaggcgctggcccaggttgaaacactgaaaaccgcggtcaaggaccccggttaccagacggtgttgaatgaggtctccgggcatattgcttcgttcagtgaaaaactcggtgaatacaccggcctgctggcccaggagaaggtggtctacaagcagttgcgtgatcgcgccgagcaagtggtcagccgggtcaaccaggcttacgacaccgaagacctgtcgatgcaggcgcagcttaagaaaagcgcgatgctgatcatcggctcttcggccttggcgctgttggtggggttgattgcggcctgggtgattacccgcctgatcgtcgcgccgctgcgcagcgtgattgcggtcgcccagcagattgctgccggcgatttgagtgggcgcatggacgtcagtcgccgcgatgaaatcggccaactgatgcatgcgatgcagcagatgggcaatggtctgagccagatggtcagcggcctgcaggccggtatcgagcaactggccagctcggcgcattcgttgtccagtgtcaccgaacaaaccaatgtcgaagtcagtagccagaaagaagaaaccgaacaggttgccacggcgatgaatcagatgaccgctaccgtgcacgacgtggcgcgcaacgccgaagaagccgcgcaagccgcacagacggcggacgacaaagtcgacagtggccagcgggtggtgcgccagagtttgcagcgtattgaattgctggccacctccagcaccagtgccagcgccagcatcgagagcctgagcgccgagatccagaacatcggcactgtgttgagtgtgatcaaaagcgtggccgaacagaccaacctgctggccctcaacgccgccatcgaagccgcccgcgccggcgagcagggccgtggtttcgcggtggtagcggatgaggtacgggcgttggccaagcgcacccagcaatcgaccgaagaaatcgagcggctggtcagtaccttgcgcaacgcggcacagtcctcggtgcagcagatccagcaaagcggcgaactggtgaagctggcggtgagcgatgccctggaaaccgagagcgccctgggcagcatcgcggtggcggtgtcgctgatccagcagatgaaccagcagattgccgcggcggccgaggagcaaagctcggtggccgaggagatcaaccgtagcgttaccagtatccgcgccagtgccgatcagtcggcgctgagcatgcagggcaacgccgcatcgagcattcagctggcgcagttgggcgcggaactcaaagggatggtcgggcacttccgcctgtgatcgcagcgttcatgcggcgatcacaggggagggcggtcaggcgttgttggcgaggaaggtcagcagggcttcgttgacgaagtcggggttttccctggcgctgatatgcccggcttgcgggatcaggatcaggctgcagccgatcaggccggccatttcctcggactcggcaggcgggcgcggtttgtcctgttcgccgcacatcaccagcgtggtgtcggcgtccagcttcggcaactgctccagcacatcctcgcgactgaagatcaagcgacccaggggcacgatgctctgcagcaggcgctccttggagtagccctgcaattgctggcggaaatcctgatacagcgcggattcgcggtcgatacccgggcggaagaagatcggcgcgaccacgtccagcaacggctcagggatagcgccggcgtcttcgatcatcttgaatagcgagaagtaatactggcgcgtggcctcgggctcggcacccaggtaggtgtccatcagcaccaggctgttgatccgctcgggagccagcagcgccaaacgtgcgccccacataccgccgaccgagaggccgaccaggttgatctgtggaatatccaactggtccagcagggccagggcctggcgcgcgaggtcgtcgagggagtgggttggcgcgggcagcgggccggattcgccatggccccacagctcgggcacgatcacccggtactgttgcgacagggcttcgatctgcggcgcccacatgtcgcggtcccacaggtagctcgagcccagcaggacgacggggccggaaccctggtcgacgtagtgcagcggttgtccatcaatgacggcgacaggcataacgggcctctgacttcatggagtgaggggcacttttttacgctagtcgggggcggggggatagatgcaaagtgatggcatctcgggaagcggcgaggttgtttgtactgacctggcttttatgactgtggtgagcgggctcaccacaggccagtcttcaagccagcgaatcagtcgtagatgactttcttcttccactcggcgtcggcgtcgaccactttgaggccttcggtcagttcgttgacttcgtcttcagccggcttgctgttggtcagcaccgtggagttggcgcgtcccagctgggcttccaggtgttgcagctgggcgctgtagatcaccggctccggctgtttgcgcaggtactgcacgccgcgttcgaatgccagtcgcgcttggcccggctggccttgttgcagggcgtgctggccgaggttgttgaagaactcgatatgcagcaacaccaggatatggcggatctcgcggatccagtgcttggcctcgttggccggcaggaaaccgtcctgggccgcacgggtgacctggccgtgcagggcttcgagcaggaaacgcacatccttggccttggcttcggtctggatcggcgcgggcgggttgttcaccgggatcgattcgccctgggccaccagcgtattcaactcggtgatgcgggccttgagcggcgcgctgcctttgttcaggttcagcagccgttggttgacgttgagttccaggcgggtcagcaataacttgagtgccggggtcatcaattggccggggaaggtctcggtgatttcaccgcagcggcgcaggcgatcgttaagctcgatctcggtgcgcttcttttccagcttgttgttttccaccacgtggttcatgtagccaatggcgatcagtattgcgatcccggctattaccagcagggtgatcatgagtggtgtcaccggtgtgacctctttatagggtttacagtggagtgtagtgactgggccatccggcggataggactgatcgaccagctgcccgggtagtttgcttctatatggataggcgttccctgcatggatgcacattgccatcatttgccggaacgaactatagcgtcttgtcgggcgccataatataggcgtcaaagcccggacgtgcacaattgccccatgagctcgaaaagctgggggaagtcattgattttaataaatttatccttgggggttgacgatctttcaatccgtccatagaatgcgcgccacttaacgcgtaaagcacacagcaaaacgcggttaagcagtgaatgttgtacgtgtgtccccttcgtctagtggcctaggacaccgccctttcacggcggtaacaggggttcgagtcccctaggggacgccatttgcgggaatagctcagttggtagagcacgaccttgccaaggtcggggtcgcgagttcgagtctcgtttcccgctccaatttaagcagtgtggctctcgggcggcactgagtgaaaccagggcatgatcttcggatctaacctctggacactgaaatacacaccatgtgtttcagttgtgtgtccccttcgtctagtggcctaggacaccgccctttcacggcggtaacaggggttcgagtcccctaggggacgccatttgcgggaatagctcagttggtagagcacgaccttgccaaggtcggggtcgcgagttcgagtctcgtttcccgctccaatttaagcagtgtggccctcgggcggcactgagtgaaaccagggcatgatcttcggatctaacccctggacactgaaatacacaccatgtgtttcagttgtgtgtccccttcgtctagtggcctaggacaccgccctttcacggcggtaacaggggttcgagtcccctaggggacgccatttgcgggaatagctcagttggtagagcacgaccttgccaaggtcggggtcgcgagttcgagtctcgtttcccgctccatattcaacaaaaacgccgatcagcaatgatcggcgtttttgtttgtgtgcgatttgtgcagagccgccgcaggcccgctgcggcagcgttcactgcgtcgtcagggcctcctgcgccggcatgaaaaaacgcgcaaacaactcggattgagacttgatgttcaatttgttgtagaggttgcgacggtgaactttgatggtctctgccgacaggttcagcttgccggcgatttctttgttggaaaaaccgctcaacagcaacttgagcacatctttttcgcgcgccgtgatttgcgtgcccagttgcacgatggcctctgaccagggtggcggttcgtcctggcttttttccgcatcggtctcaaagcacatgcgctgatgcatcaacgccattacccatggcttgatgatgtccagggtcgcgatctgctgcgggctgtagcgcacgttgctgccaaatgaaatgcacagcgttctgtcggcgtcgagttgtacgttgtactgcacctcatccacgctgatgtactgggcgaaatactggtggtaatactcggtggtcaggaagtgctccggcgcgatgtcggacagatgaaaaaagccgctctgcgggttttcgcggttggcaatgtagaacgggtcgagcaggtacagcccttttacatagcgctgggtcaacgcgtccacttcgtccgcatcggcgacctcagtcacgctgaccacccgtacctgctggtcgctgaagatcagcacgacccagttgtcgatctggacgtattcctttaacacacgaaccagtgagctccagaacgccgggcggttcagttgcatgatcagcgtcccggccgaccgatgccaggccaggttgtgaaggtcgagcgacatgtactacccctttagggttaggcattcatggggcggggctaagtacttctaggtatttactaatcggacgtgccgagtatattcacccctcagcggatgaaggccatgatggcctgtcgtttttgacaaggatagcgatatgagtcaaccccctttgcgcgccatgttcatggcggcgctggtctgtgtgggcgcgagcgcgccggtcttggcggccgaaccccgggtcaacctgtacaactggttcgggctgatcgccccggaaacacccaaggaattcgagcagaaaaccggcacccgcatgcacatggatgccttcgacagtgccgagatcatgcagagcaaggtcatggccgggcgtaccgggtatgacgtggtcgtcgccacgtcgaatgtcttgcccagcctgatcaaggccggcgtactggcgccgctggaccgctctcaactgagcaacttttcgcatatcgatccggagatgctggcgctgctttccgccaatgacccgggtaaccgctacgccgtgccctacctgtggggcaccaccggcattggttacgacgtggacaaggtcaaggccgccctgggtgagaatgccccggtggacagctgggacctgatcttcaaggaagagaacatcagcaagctcaagtcgtgtggcgtggcgatgctcgactccccgagtgaaatcatctcgatcgccttgcattacctcgggctgcccagcaatagccagaaccctgaggattaccagaaagcccaggcgctgctgctgaagatccgcccttacgtcctctactttgactcatcccgaacggatgccgactttgccgatggcaatatctgtgtagtcgtgggctgggcgagcggggcgctgatggcacaggccatcaatgaaaaaaacaacaccgggcgcaagattgcctacagcctgccgcgtgagggcgggttggtgtggtcggaaaacttcgtgctgctcaaggatgcgccgcatgccaaacaggggctggcgtttatcaactacatgcttgagccgcaagtgattgccaagagttccaaccacacgctgtaccccaacgccaacaaggatgccaccgagctggtcgaacagaagttgcgcgacaacccctggatttatccatccaaagagaccattgccacactggttccccttgaaccgctgcccttgaagttggagcgaatccgcacgcgtgtgtggaccaaagtgaagagcggcacgtgaccggctgaatgaccaggcatgtcgggcggttgcaggcgtgccgttgaaggagatcaatcatgggccaagccgaatatcagcgcgacgtgaagtcggacgatgacgaggcgtacacggaaatcgaagaacagatcggccactgtacgcccgaacaagcctgggccatgtattacgtctcgaccggcatggtgcgtgagtacattacgcgggcggtgatggagcacattggccggggcaaccgggcgctgctgctggagttcccggaactggcccgggccgaagagaaatcccgcttcctgctgccgctctaaccgcatgccgatcagtgatgatcggcatttttgtgtgtgcgcgggtttgccgctttggccaggcgcaccgtggcctcacggatttctgcctgattgagtgaggcaaagcccaggcgcagtgcgttttccggctggtccatcggtgaaaactgccgaccactgcgtacgaccagcccatgctccaatgcggttgccaccatctgctcgacgtttatccgatcttcaaaacgcacccacagcgccagcccgccttcgggttcgcgcaccctgatccgatcaccgaatgccgcatgcaggcagccctgcaagacttcgcggcgggcgcggtattccttggatacgcggcgcaggtgtttcttcaattcacccgcgttgatcaggtccgcgagcatcttctgcgccaccgcgtcagcatcgcccagcatcaacgcggcgttgccgtgcagggcttcaatgaccggtgtgggcgccaccacatagctgcagcgaaacgtggaaccgagcgccttggacaacgagccgacatagagcacatggcgctgcgaacggtcactggccagcggcaggtagggtcgcccgttgaagtgatattcgtggtcgtaatcttcttcgatgatgcagaagtcatgtagagccgccaatgccagcagctgttgtcgccgcgccgcgtgcaggctcacggtggtggggaattggtggtgtggtgtcagatagatcatccgcaccttgtgctcgcgacacaggtgatcgatctggtcggtgcggcagccttcgtcgtcgacgtccaccgtgaccagttgcgcacccagcttgcggaaaatctcccacgccggcgggtagctcaggcgttccaccagcaccacgtcgccaggcttgagcagcaggctggcgctcaggtacagcgacatctgggtgccttgggtcaggcagatattctcggcgctgaccgtcagcccacggttgttgctcagcatttcggccagggcacagcgcaactcatagccggtgccctcactgccatagcgcaccgtattagaggcgaagctgttgcgcagggcattacggtagtagcggtgcagcacggcttggggcagcaggcggtggtcactggtaccgttgtcgaaaaacagtgcgccatgccgatgctgcagcgccgtcacctgggcgttctgagtgaagtacggagcgttcgcctgcgccaggaggggcggtgcaaacgactgctgcacgcgggcaggcggatgcttgggcgccaattgcgcattgacgaaggtcccacgccgcggctcgctgaccagccagcctttggtcatggcttcttcgtaggccaggatcacggtcttgcggttgacgtcgagcaactgcgccatttcccgcgtacccggcagcaaggtgccgggcggcaagcgaccttcgacgattgccgtcaccaggccttcggcgatcttgcgataggacgcctggctggcgctctcgtccagcttgagcagcggtcgccatttacgcatctggaccatctgaagtatccaaaactggaggttttaatgggcctagtctagcgcaacaatcaagcctcactcacccctgaggttgttatgcacacacgtcatgtcatcgaactgtccccctcggggaaaacctttgcggccggtgacgaactgttgctggatgcgatgcttgccagcggtctgtcggtgccgttctcctgccggcgcggtgcctgtgggtcgtgcaaggtggtcgtggccgaaggggagtaccgggccaagacccttgcgccggacgcgccggcgccatgctatccattggccgccaatgaaatgctgttgtgccagagtcatgcctgcggcgacatgcgcctggaaattcctggctggtcgctggatacgccgacgctggtggtcgaggcacaggtcgtgagcaagcgcgcgctggctccagacatcgttgagctggtgctgatgccggacatgccattggcggcacgggagggccagtacctcaagttccgtctggtcgacggcgactcgcggtgcttctcgatcgccaacctgccggccgacgacgatgggcgcctggtcttccacattcgccgggtcagcggcgggttgttttccgaggtcctcctggacgacttgcacgctggcgatctggtgcaactggaggggccttttggtgcctgcacctggcaggaccatgacgatgcgcccgtggtcctgttcgccacgggcactggctacgccggcatcaagccgatcctgctgagcgccttgaagtgcaatgtcgaggtgacgttgtactggggtggcgcgcagccggcggacttttacgaccgtgtgttcctggaccagtcagtcatcgaccatccgcgttttcactggcacccggtgctggcgtcgcaggggcgggtgcaggaggtagcgctgggccacgggcatcactgggatgccgcccatgtgtacgcgtgcggcaacggcgcaatgatccgccaggtccgcgagcagtgcctcgacgcgggcttgccggctcaccggtttgtcgccgaagcctttgtgcccagcggtggcgcaggtgcgcaaacgccttcacctgcgtttgacccgatctgggaaaaggtcggcccccgttactcgttcgacggcatgctggcggcccgtgaccaatccatccgcgccctggcggccattgccagccggctgcgggtgggcatgactaccggcgaagccctcgacatggccgccgaacaactgctggcgatgggcgcgtcacacacctggcacccgacctatattcgcttcggcgccgacacggtccgcccaccccgcgaagggatcgaccgtcagcgcaggctgcgcgccagcgatatcgtcgtggttgacctggggccagtgtgggacggctacgagggcgactatggcgatacctttgtgttcggtgactcgccgctgcacctggcgtgcacgaccgcgctgcacgaagtgttcgacgagacccgcgacgcctggttgcgcggcctcaccggtcgcgaactgtatgacttcgccgagcagagcgccgtggcaaaaggctggaggctggcgcgcaatctcgcagggcatcgcctcgcggacttcccccacgcgttgttcgagaacaaggagttggcggatctggacatcccgccgagtgaaatggcctgggtgctggaaatccagctgtgccatcccacggaaccggtcggtggatttttcgaggatatgttgatgctgcaagcctgaagagcccgccattgcggcgggctccttaacatcagagcttcggcagttggccgatacggcccatcatttcggtgacgatctgcaggtcgagcaggaactggtcgacggtcttgaactcgccgtcggtgtgcccggtgtacttgacttccgggcgcgccaggccgaattgcacgccgttgggcagttcatgcaccgaggttgcgccggctgaggtgccgaacttgtgctccatgccgaggttttccgtggcgactgccagcaaggccttgacccactcaccttccggattgcggtacatcggctcggccaccgagtaggtgaagcccaccttgaccttggttttcttgtcccaggcgctcagtttgtcggcgatttcggccttgagtttctctggcgacttgcccttcggcacccgcaggttcaccgccagcttgaaggctttgtcatccaggccgacaaaggtcagcgaagtggtcagcggccccatgaactcatcggagaagcccacgcccaacttgccgcccaggtagtccaggccccagttgtcggccgcataccgcgccgcatcggtgatgtggttgtgcttgagggcgatcttgccgtcgacgctgtggatcagctccagcatgcgcgccaccgggttgaccccggactccggctcggaggagtgagcggacacgccggtgacggtcagcttgacgtctttgccgtcgaccttggcggccactgcaaaatcgccgccgttgcgcttggcgtattcgctgccggccttttgcaggctggcggccaactcggcaggtttgtcgctgacgaaggtcgccaccgacgccgacggaatctggttggtagccatgccgccggtcatcgcgatgatttccgcgcctttgccttcacccttgcgccgtgggaacgtcgccatcaccgtgccgtagcctttctcggcgatcaccaccggataaccgccatccagcgcgaggttgtactgcggtgtcgggttcttttcgaagtagtaggggatcgcgtcgccggaggtctcttcggtggtgtcgaccagcagcttgaaattgcgcgccagtggcagcttttcttccttgatcaccttcatggcatacatcgccacgacgatgccgttcttgtcatcttcggtgccacgaccgtacatgcggtcgccgatcagcgtgaccttgaacgggtcgagtttggtgccatctttgagcacccaattttccggcgtcaccggcaccacatcggcgtgggcgtggataccgacgacttcgtcgccactgccttccagggaaatctcgtacacgcggttgtcgacgttgcggaagttcaggttgaaggccttggccaggtcctggagcttgccggcgatcttgatgaattccgggttcttgtactgcggcaggccgtcgacgttgaaggtcgggatttccaccagttcgcgcagggtttcgagggcggctttgccgtacttcacccgagtgtagatgcccagcaggcgattgatttcgttctgctggtcggcgctcaggggtttgttgtcgaggaaggcattgattgccgggccgacgtcgctggtcttgcccaggtcgcctttagccagcgcgccgaggaaaccgcgaaaatcggtgatggacgtttcgttgaagttcttgagaatcgccgtgctttgctcgggcgtgatgttggcgaaggcggggcaggtaaccgccgacaggctcgccgcaaacagggtggcagccgccaattgcttgagtggaaagtgcatggagagacgcattcctttgcaggtagtgagtaggaggtttctgatcgatctgtcagaaacatttccacacactaccattagtcaggtgcctctggtcaatgctggccaggatggggctcggggtactcctcagtcacgtccaaggctctggcgtagggcccatcccacaactgctcatgcaattgcccgacacgcttggccatcgcttcgttgtgcatcaccacttccaggttgcgcgaattatccaggtagccacccagccaattgctggtgccgacccacgcaacttggccgtcgatctccatggtcttgctgtggatcacccgcgcatacgggataaacccttgtttggcctcgggcagggtcacgatcttgatctgcacgttgggcagcacggccaggctcttgaggtagggcagctccagcttgtcggtgttccagttggacaccatcagcttgatcgacaccccacgcgccgctgcagcgcgtacggcgttgtcgatcaccgcgtagtacggacgggtcttgtccggtccgtaggacaacggcgcgtagtccagcaattgcacgcgcacttcctgcttggcttcgctcaacaggcgcggcagttccagctgtgagtcgcccacgccaggcgggttgtagcgctgcgggctggcgaccaggtagttgccggtgcgcggtgcctccttgccagcaacgggcagcggcaccggctggttgtcggtcaaggcctgctgggcgttccagtcctggtcaaagatggcctgcacttggcccacgaccgttgcatcggtgatacgcagcccggtttcgtgaatgtgttccagcgagcgccaatcgaaattctggctgccgacaaacgcctgcttgccatccactaccaggtatttggcgtggatgatcccgccactcacacgggcgtagggcaagacgcgaaaggtcaggttggggatcgcgcgcaggcgttccagggtggaggcctccgacaacttgatgcctttttcttcgagcaaaaagcgaatcttcacaccgcgtttgccggcggcttccaggcgctcgatgacacggtccatcaccgaaccggggtgatcggcggcgtagaactggccgatatcgatgcggcttttggcgccgtcgaacagctcgctccagaccgggccgggctggcgcaggtcgtcggtgccgagggcgctgtccaccggtacggtgtgtaccagttcaaaccccggaatcgaaaagtccgcctgggccagcggactgaggagcaagccggcaaggccggcgatacgcaatttcaaggagacggacataacactctcttcactgatgtagtgagcgggcttgccccgcgctgggtggcgcagccgccccaaacattccaccgcgttgtcccagaaagaccgaggtgcctggatatggggtggctgcgccacccaacgcggggcaagcccgctcaccacaggtttatgcggtgcggctgtgcagcggcgtcggtacccgatgcggcacttcactctgcacacgggcaccggtggcggcgcggatcagcaggatcttcagctggtcgttgatgcgctccaggctgtcctggaagaagttgtggaacaccacgcagaacagcgcgatggcgatccccaggccggtggcgaacagggccgtgccgatgccgccggagatctgccctgggtcggacacgcccgccgtcgccagcgccttgaaggtgtcgatgatgccgaggatggtgcccagcaagcccagcagcggcgcggcggtggtgatggtttcgatgatccacaggctgcgggccagcggcgcgcgggtggtcaggtactgggtttcgatgacgtcatccagatccttgcgcgagccttgcgaggctttctgtgccagcaccggcaagaccatgctcagcggcaggctgtcacgccgggtcaggctctccggcaggtcgcgttcgctgtgcacgttggcgccgagcacctcgttcagcgcgcgggcctggcggcgtacatacgcgaagtaaatcccgcgctcgatggtgatgaagatcgcgatggccatcgcggcatacatcacatagaaggtgatgtcgtggagcaggttcatgtccatgttcacttacctcgcaattagaaattggcttccagggaaaccgtcacggtgcgttccaggcccacgatgtaggccgggtcgccgtcgcggaaaccgccgtaggtggccgcgttggtcttggtggtgtacacaccgtccaagtacttcttgtcgaacaggttgtcgacgttcaggcgcagggtcgcgtccttgaccaccttcttgtccactggcaggtagataccggcgccggcgttgaatacggtgcgcccggagatcgcttcgtcgttggtcaggtcgccgtagagcttgctggtgtacttgccgccgaaggtgccgtagaagcggccgtcgtcgtagccgatgttggcggccagcatgtttttcggcacgttggcgaactgcttgccgctggtgggcaatacgatcgctttgccggcgttgtatacggtcaggtcgtcttgctgctcggccttggtgtaggtgtaggaggtgtagtagttgaagtgattgggcagcaggccgctccactccagttccaggccgctgttgttgacggagccggcgttgatgtcggcgaagtcgccgttgatatcgcgcgacgacacctggcgatccttgaactgcatgtagaacaaggtggcggccacggtcatgtcttcatcggtgtagcgccagcccagttcgtggttccaactggtttccggcttggcgtcgatggagcctgcgcccttgtcgtacagcacgtagttctgcgggatgcgcatgttgcgcgacaggctgtagaacacctggtcgcgttcatccacctggtatttgaggccggcgttgggcagcagtttgttgtaggtctggttacgtttttctgcttgctcggtgaggctgccatggttggtgccgtcacgcttgacgttcatataggccagaccgccgatcagggtccagtccgagttgatgtaccaagtgtcctgggcccagaccttctgcgccggggtgatggtgaagcggtcgcggccctggatggtgttgccattggcatccaccaccgcctcattggagtccggccaggtatcgaccggcttgccattggccttgagcggaatgaacggctgggtctggctctggcgcgcgcgctcgtaccagtagcccacttgcacgctgtgatcgcccaggtcccagttcagtttggtggtgatgcccggacgccaggtctgggtacgtgaagggcggtagtacacgccgctgttcggggtgccgtcggcgttgtattgggcgccggtgggcaggttgcccaggtcgaacacgccgccctggttcgagccgcggttgagggcatagctggacgagccgacgccgctgccgttaccccagtagtagtacgggatcaccgacagcgcgaggttgtcggccagtttgaactgggtgttgagcacggcggtgaacgtctggaacgggttctgcgccagggcgtaataactgttgtacttgccgttgctacccacggtgggcgtggcggggtaagggtcgtacttgcggccgttctgctggaactgcgccttggtcagttggctgtaactgttgttgtcctgctcatggtacttgaggatcaggttggcggtgttgccatcgccggcatcgaagaagctgttccactcgactttgtccgcacgcacggcgcccgaaccgcgccacatctggccttcggtgtgggaggccgacagccagttgctcaggccgttgatctcgccggtgttgaggcgggcgaaggtcttgcgggtggcgttgctgcccatgacctgtttgacgaacgcaccggtttccttggtcggtcggatggtcacgatgccgatgttgccgccgctggagccgatgtgcgggccgtcggcttccgaggaaccctgggtgacgaagatctggtcgatgttttccggatcgcccagcaggttggagtacagcgcgtagttgccggagtcgttgatcggcatgccgtccaccgacatccccacctggtcggagttgaggccgcgcatggtgaagcgaaagcccgacaggccggtgttgtcttcgctggaaatgttcaagcccggggtgtacttgagcttgtccaccgcgttgccggtggcggtctgtttatccagcgcttccttggtcacggtggagcggcccttgatgctttcttcctgcaccatgtagccgccacctgccgtggccttgccctgaaccccaatagtcccgacgtcactgtcgcgggtgtcggccatgaccattccatggcccatgcttgcggcaacaagtgccagatgaatccgtgtgaacctcatctctgtcgtcctggtgtcgggtgcttattgcacgctgtagttgaaggtggcggtgaagcgctgctcattgcggcccccgaaggcttgctcggggaacggcttgacttgcttgatgcgacgcaagctgttggtggcggcccggttgagcaacatgctcgaggcctgggtttgcaagccggagtcgaggacccgaccctggcggtcgaccagcagccagatcaccacttcgccgctcgggcgttcgagggaagcctggcgtccggtggggtactgcttgtaggtgtccaactcgttgcgcaaccccttgaggtaaccgccttccagcgcttggccgtcgaccttgggcggggcgggcggcgcgggtgtcggtgctgcctgggccacaggtgccggtgccggtttggcggcgaccggaggtggtgtcggtactggcgttggcttggccaccacgggcttgggcacaggttttggcttgggctcaggcttgggttttggctgcggcttgggcggtggcggcggcggggctggctcggcctcttcatcctcgatcaccggcggtggcggctcttgttccaccaccggttccgggatcacttccggctccggctcgaccaacgccagctcgacggcggactcgtcatacaccggttcgaccttcaaggtctgggactggatacccagtgcaatcagcaccagggcgatcagggccgggacactgcccagcagctgacgcgcacgaaacaatacgtacatgatcaggacttacgcgtggcaatggacacggaggtaaagccacccagacgcagggtgtccatcacctccaccaggcgcgaaacctcgacgcctttgtcgctgttaacgatgatggtcgacttggtgtcaggcttttcggctgccttcaacgccggcaccagcgcatcgaccgtgaggtccttgccatccagctgcaactggccttccaggcccagggtcaggatgaatttgttctgtggcttgagctgctgcgaactgctggcgctcggcagctgggtcttcatgccgagggccggaatcacgttcaggctcacgagtacgaaaaacaccaggaggaacatcatcacgtcgatcatggggatcagttcgatgtgcgccttgcgttttttcggttcgtcccaggttctcattccgctaccccgttattgaattaggggcgacacgctaacaaccaaaaatgaccgattggttaactttaattgacggttttagggctctaggacgcgtctttcagatgactcttgagtcatttttgtgacgtaacagaattgaaacccggcaggggcattctcaaaaactttacatcgagggcccccagagatgagtagcgaattgccatgtctttccaccccgcggcttctattgagagcactggaaaagcaccaggccgagacgttgtgcaccctcgccaacgggccgaagatcgccgataacacggcgagtattccgtcgccctataccctgcaaacggcgcaggattttatcgacggcatgcaggagaaatttcgctctgtggggttgctgagcctgggcgtgcatgtgcgcgacagcggcgaactgatcggcatcgccagcctgcgcatcaatgcggctcatcactatggacaccttggcggctggacggcggcggatgcacgcaacctggggtatgcgaccgaggccgcgaccgcgttgatggactacggctttggcgaacttggcctgcaccgtgtgggcagccagtgtttcagtcgcaacaaggagtcggcgcgggtcatggagaaaatcggcctgcagtacgaaggctgcatgcgtggggcgtttctcaagaatggggtgcatgaagacatgctggtgttcgccaccctgcgtgaggattgggagtttcggctgtgagcggcgacgttgatcacggtcggcgccgggtcctcgccgggctggccgttgccaccaccttttcgatcctcagcccgtttgcgcgcagtgccggggtggactacccgttcaccttgggcgtggcctccggcgatccattgcccgacgggtttgtgatctggacgcgcctggcgccgctgttcaatgccgccgatggccggggtggcttgagccgcccggtgccggtgcgctggcgagtcgcccgcgatgcggcgatgacccgcgtggtgcgccagggcgaggtcatcgccactgagcgctgggggcattcggtgcatgtggaggtggcgggcctggagccgggcaggccgtactggtaccagttcgaagggctcggcgcgcaaagcccggtggggcagtcgcgcacggctccggcggtgcatgccatggtgtcggcacgcttggggtttgtctcgtgctcccattgggaacgtggctatttcagtgcgtatcgccacctggcgcaggagcaacccgacctggtgttttttctcggggactacatctacgacagttcctacgcggcggattccggcaagatcattcgcccccatggcagcggcaatgccgtcagcctgagcgactaccgcaaccgttatgccttgtacaaaaccgatccggatctacaggccctgcacgctgccgcaccgagcgtggcgacctgggacgatcacgaagtgcagaacgactacgccaaccgctggtcccaggacccgaagatcccggtggggcaatttctgcagcagcgggccgcggcctaccaggcgttttacgagcatatgccactgcgtgccagcagcttgccgaaagggccggacatgcgcatttatcgacgcatggactacggtcgattggcgcgtttccatgtgctggacggccgacagtaccgctccgaacaaccgtgcattctggcgaatggcagtcaccaggggcatatcgccgataacctctgtcatgacttgcgcgacccaggtcgcaccctgctcgggtggcaacaagaagcctggctggaccagggctttgcccagtcgacggcgcagtggaacatcattgcccaggacttgctggtggcgccgttgacccagcgcgacctgaccaaccacaaaccggggcgctggaccgatggttgggatggctacatggccaaccgttcacggatgctggcttccctcgagcgcaatcgggtcaacaatccagtgttctggggcggcgatattcattcgttctgggtgacggacttgcatgccgatggcaacaacccggattcgccggtggtcgccacggagttcgtcggtacgtcggtgacgtctgacgggccgccgtttgaggcgttcagcaagatcctgccgcttaacccccatgtgaaattctttgacagtcgtcagcgagggtatgtgtcggttgaggtgcaggagggcaggatgctcacgcacttgcgcgtgattaccgacccgcgtgatccggcggccaccgtgtcgacgctgaagtcgtttgtggtggagtcggggcgggcgggggcgatagaggtgtaagggatagacgcactttttgtggcgaatgagctgttgtggccagtggacttattgtggtgagcgggcttgttgtggcgagcgggcttgccccgcgttgggctgcgnnnnnnnnnnnnnnnnnnnnnnnnnnnnnnnnnnnnnnnnnnnnnnnnnnnnnnnnnnnnnnnnncgcagcccaacgcggggcaagcccgctcgccacaagggtgagtgcggctggttcaagcgatttcgtagcgtaccgacaacgcgccctttttctccgacaacgccaggatggtgacctggcccagttcacccaaggtctgcacatgagtgcccccacaggcatacgcaggcaattcgccaaagccgacctggcgggtgccgtcttccaggttcatatggcgagggtagtctgcggcgatccattggttgacctgttgctggatcgtctcggcttccatggctcgcgccgcgtcaccacgtataaaggtgatcttgccttcgcccggccagtgatgagccttgatcggcatccagcccaggctctcgcccacgttgccgatcaagtgcccggcggaatgcagccgggtatgcaacgcccggcgctgttcatcgacccgcgcgatgacgggacccggctccagcgggcggtcgatgtagtgcaccacgcgatcggcctcttggataacgcgcagcacagtgctctcgccgagccagccggtatcgaagggttgcccgccgccctgtggatgaaaaatcgtcgactgcaggatgaccgcgaactggtcctcatggggcgtgcaactcagcacctccagttcggcagtcaggtggtcgtgggtgaaaaacaggcgttcggtcatgatctacatccgcatcagggttctgcgggcagtataaatagtgcgcggatgggtgataatccgctcagttatcaatggacctgtgcaccatgagcatcaatctaccgttgccgctgctgggcgagatggcgattttcgtcaaagtggtggaaaccggcagcttctcccaagccgcccggcaactgggcgcttcaccgtcctcggtgagccgcagcatctcgcgtctggaaaaggccctggccacgcgcttgttgcaacgcaccacgcgcaaattacgcctgagcgaaggtggtgaagaggtgttcaagcgctgccaggagatggtcaacgcggcacgttcggtcatggagatcagcggacagttcacccacgaagccgaagggctggtgcgggtcagcgtgcccaaggccgtggggcggtttgtggtgcacccgcatatgccggagttccttcggcgttatcccaaggtggatgtgcagttgatcctggaggatcggcaggtggacctgatcgatgacaacgtcgacttgagcatccgcatcaccgacagcccgccgccggggctggtcggccggcagttattgcctatcgagcatttgttgtgcgcgacgccgcagtacctggccgagcatggagtgccgggccatccccatgatctgttggaacacagttgtatctacctgggggaaacgccaggggactcgcgctggaaattccgccaggcgggcaaggcggtgacagtggcggtgcgcggccggtatgcagcgaaccacaccggcgtgcggctggatgcagtgttgcaggatgtggggattggcagcctgccgtactttacggcgcgccatgcgctggaggaggggcggttggtgcaggtgttgccggcgtgggactttatcgcgtcctatcatggcgaggcgtggttgctgcattcgcccacgcgctatctgccgccgaagttgcgggtgtttattgattatctagtggcgtgcatggcgaaggagccgacattgcgacggcccattccggatcgctgatcagtgcttgctctggtcgtcgggcatggccagcagctgtttttcctggttccagtcgaacggttcgtcattctgttcggcttcaaaacggcgctcttccagggcctggtacaggtccagttcttcatcgggcatgaagtgcaggcagtcaccgccaaagaaccacagcaggtcgcgtggcaccaggtgggcgatctgtgggtagcgcaggatgacctggctcatcaggtcctggcccaggtactggctttcgatcgggtcgatcggcagcagggcgcgcagttcgtcgaaacgctccaggaacagggagtggctttcctcgggcacctgttcggcttcgccgacggcaaccaggatgctgcgcaagtggtcgagcaagacgagatgatcggcaacgacgttggacacgagataagtcctctaaagcaaaaacgggcgcgagagtatatagctcggtgccctgcctcacaaatacgattcattttgacgagtggctgttgttgtcaggcaaggcgccgcgacgactcatagctcggctatggggaggagcggcaacgcagcgtggcgacaacagacgccgtcaaaatggatcagtatttgtgaggcagggcactttgcccgcatttatatgaccgctcgcctcagcggactttaccctcagcctgggtcagctcttccttgctgaagtcatccacgtcgatcaccttgcgccgcgccgcttcggcgtcacgcagggtctgcgcttcagccggttgcagcacgccggcgtgcagtgccgcatcaatggcatgctcgccggcagcaggtttgacctggccactcttgagcgcggtgtgcagtttcttttgcagcggatggctggcgcccagcaggtcgtaggcatgttgcagggcacccaccgggtcttccgccgattgcgggcggtagcagccggccagcaattcttccagggtcgggtcgcctttggcgcggccgatcacggcggcgacttcggcgtccagcgcatcggacgggccggtatggcgacgcccgaacgggaacacgatcacccgcagcaggcaacccagcaccttgttcgggaagttgctcagcagctcatccagtgcgcgctccgattcgcccaggctttcttccatggcccaggcgaacagcggttccaggtgatccggcgaatccaggtcgtggtaacgcttgagtgcggccgatgccaggtacatatggctcagtacatcacccaggcgtgccgacaggcgttcacgacgtttcaactcgccacccagcagcatcatgctcaggtcggccaacagcgcgaacgcggccgcctggcggttgagtgcgcggaagtaaccctggctcaaacgattgcccggtgccttctcgaaatgcccaacaccgaggttcagcaccagggtgctggcggcgttgctcacggcaaaaccgatgtgttgcatcagcaggctgtcgaattccttcagcgcctggtcatggtcttcgcgaccggccagggccatttccttgagcacgaacgggtggcagcggatcgcgccctggccgaagatcatcaggttgcgcgacaggatattcgcgccttccacggtgatgaagatcggcgcgccttgccagttgcggcccaggtagttgttggggcccatgatgatgcccttgccaccgtgcacgtccatggcgtggctgatgcactcgcggccgcgctcggtgaggtggtacttgaggatcgccgacagcaccgagggtttttcccccaggtccacggcattcgcggtaagcatgcgcgcgctgtccatcagccaggcgttgccgccgatgcgggcgagggcctcctggatgccttcgaaggccgacagtggcacgttgaattgctcacgcacctgggcgtactggccggtgaccaggctggtgaacttggctgcgccggtgccgaccgccggcagggaaatcgaacggcccacagagaggcagttcatcagcatcatccagcccttgccgagcatttcctggccgccgatcaggaattccaggggaatgaacacgtccttgccggagttgggaccgttcatgaacgcggcgcccaggggcaggtggcggcggccgatttccacaccgggggtgtcggtggggatcagcgccaggctgatgcccaggtcttcttcgtcacccagcaggtggtccgggtcatgggccttgaaggccagcccgagcagggtcgcgaccgggccgagggtgatgtagcgtttttcccagttcaggcgtaggccgagggtttcctggccttcccattcacctttgcagatcacgccagtgtcgggcatcgcgccagcatcggagccggccagcgggccagtcaacgcgaagcacgggatatcatcgccacgcgccaggcgcggcaggtaatggttgcgttgttcttcggtgccgtagtgcagcagcagctcggccgggccgagggagttgggcaccatcacggtggaggccaggtcgccgctgcgggtggcgagcttcatcgcgacctgggagtgggcgtaggcagagaagcccttgccgccgtattccttgggaatgatcagggcgaagaaaccgtgggtcttgatgtgttcccaggcggcgggcggcaggtccatggcctggccgatttcccagtcgctgaccatggcgcagagttcttcggtggggccgtcgatgaaggcctgttcttcttcggtcagttggaccttgggataggccagcaacttgtcccagtcagggcgaccgctgaacagctcgccgtcccaccacacggtgccggcgtcgatggcatcgcgctcggtttcggacatcggcggcaggactttctggaaccaattgaacagtggcttggtgaagtattggcggcgcaggtcaggcaacagcaggggcgcggccaccacggcgatcaacacccagaagatcagcaacagccaacccggtgcgtggctccaggcgcccatcgccagcaggtagacggcgaccacgcccagggcgggcaggggggcgacgcggcggtgtgcgaggtaggcaatgctgaccaccagcaccagtatccacaacaacagcatattcaatcctccgtgaaaccaggggcgaaaccaccagggagcttagtcggcatccgaacaagcggggtgattagggtgtaacgagatttggccgattcgtcgttatcgccgtggcagacctgtcgttaaactccaggcttccttcggagataaagctcatggatacgtacctgagtcccagccgcttcatcgatagtgaccaccctgcggtggtggagttcgccgaaaaacatcgcggaacccacgcggctccaagtgaccaggcagtcagtctttactacgccgtgcgtgagacaattcgctacaacccctacaccttcagccgtgatccagacaccttgagtgccagtttcgcgttgagcaccggcgaaagctattgcgtgcccaaggccaccttgctcgcggcctgtgcccggcactgcggcatcccggcgcgcatcggcctggcggatgtacgcaatcatttgtcgacgccgcgcctgatcgccttgctcaagagcgatgtgttcgccatgcacggttacaccgagctttacctgaaccatcgctgggtcaaggccacgcccgcattcaaccagcagctgtgcgatctcttcgatgtgccgccgctggacttcgatggcattcatgacagcgtctttcatgcgttcaaccgccagggcctgcgctcaatggagtatgtggtcgaccatgggcaatttcccgacgtgcccgaggcgtttttcttcgcgcatatccagcagtgttacccccacctgtttgccgaggacatgccgcccctgctgggtgatatgcagagcgatttgagccgcgcgtgaaccggcgtatgctgctgccttcatctagccatgttcatcaacaataaaggcgcggtcatgctgaaaatctggggtcgtaaaaattcatcaaacgtcaggaaggcactgtggtgcgccgaggaactcggcctggactatgaagcaattgatgcgggcggggcttttggcgtggtcgacacgccccagtaccgggcgctgaaccccaacggtcgggtgccgatgatcgaagatggtgactttgtgctgtgggagtccaacaccatcgtgcgctacctctgcgccaagcacgcctccagctggtacccgagcgacctgaaggcccgcgccaacgcggaaaagtggatggactggaccacctccaccttcgccgaaccgttcaagatcgtgttctggggcgtgttgcgcaccccggcggaaaaacagaactgggacaacatccacgccggtcgccaggcctgcatcgatgtgctcaaaaccgttgatgaagccctggccacgcagccgtatctgtcgggcagcgagatcggcatgggcgatatccccttgggcagctttatctacgcctggtttgaaatgcccatcgaacggcctgcaatgccccatctggaggcctggtaccagcgcctgcaacaacgcccggcctaccgcaaagcggtcatgaccgcgttgacttaatacccactattaatacgggtgactgtacttgtgcggcgcgggcaagcaccatgcttgtcatgcgccgccgttgaactacctgggctgcgccctcatctactctttctattcccttctttggtgcgtattccgatatgagttccgctctgtccatccggcagctaaccaaaacctacggcaacggtttccaggccctgagtggtatcgatctggacgttgccgaaggtgacttcttcgccttgctcggccccaacggtgccggcaaatccaccaccatcggtatcctctccaccctggtcaacaagaccagcggctcggtgaatatcttcggccatgacctggacaaatccccggcggcgctcaagcgttccatcggcgtggtgcctcaggaattcaacttcaaccagttcgaaaagaccttcgacatcgtggtgacccaggcgggctactacggcatcccggcgaaaatcgccaaggaacgtgccgagcagtacctgacccagctgggcctgtgggacaagcgcgatgtgccttcgcgttcactctctggtggcatgaagcgtcgcctgatgatcgcccgcgcgctggtgcatgaaccacgcctgctgatcctcgatgagcccaccgcgggcgtggacatcgagctgcgccgctcgatgtggaccttcctcaccgagctgaacgagaagggcatcaccatcatcctcaccacccactacctggaagaggctgagcaactgtgccgcaacatcggcatcatcgaccacggcaccatcgtcgagaacaccagcatgcgcaacctgctgggccagttgcatgtggaaaccttcctgctggacttgaagaacaacctgtcggcgccgccgcaattgctcggctacccgagccgcctggtggacagccataccctggaagtgcaggtggacaaggccatgggcatcaccgcgctgttcacccagttggcgactcagaacattgaagtgctgagcctgcgcaataaaaccaatcgccttgaggagctgttcgtgtccctggtggagaaaaatctgtcgaaggtggcggtatgagttccgaactgcaacccaacctcgtcgcgctgcaaaccatcgtctaccgcgaagtgaagcgctttacccggatctggccgcagaccctgctgccgccggcgatcaccatggttctgtacttcgtgatcttcggtaacctgatcggccggcagatcggcgacatgggtggtttcacttacatggagtacatcgtgccgggcctgatcatgatgtcggtgatcaccaactcctacggcaacgtggtctcgagttttttcggcagcaagttccagcgttccatcgaggaactgatggtgtcgccggtgtcgccccataccatcctgatcggctacaccctgggcggtgtactgcgtggtctgatggtgggcgtgatcgtgacgctgctgtcgctgttcttcacccacctgcaggtgcatcaccttggggtcaccattttggtggtggtactgacggcgacgatcttctcgctgctgggctttatcaacgcggtgtttgcacgcaacttcgatgatatttcgatcatcccgaccttcgtgctcacgccgctgacctacctgggcggggtgttctactccatcaccttgctgccgccgttctggcagaccgtgtcgctggccaacccggtgctgcacatggttaacgccttccgctacggcattttgggtgtgtcggatatcaagatcagcgtggcgatcacgttcatgttggtggcgaccgtggtgctgtacatcggttgtgcgcgtttgctggtgagtgggcgtgggatgcgtacctgactcaacgggtgtacgcgggcaaaaatgtgggaggggcggtgcgacgactcgacttgcccccgatagcgttctgtcagtcattcatgcactgactgatccactgctatcgggggcaagccccctcccacatttgtattggcgtaacgtcaggaattgagtgccagttcgatcagcccgtgcagctcttccaccgtcagtggcgcggtcgagaacagaatgcgaaacaccgtcggcgctgcgatcaggttgatcagatggtccacgctcggtggcatctcgtccggatagcgatcgacaatcgcctgaaactgcccgctcagaatgctcacgcaataccccggcgtgatcatgcactgcaggtcgcgcatcatgttgcggcccggttccgaactcatttcatccaggtattgctcggcccaggcctgcaggtcgccacgcaggctgccggtgttggccggctcgctgtcggggcgcatgcgcgccagcgccacgtccgccaatagcacggacagatcgccccagcgccggtaaatggtggagggcgtgacgcccgcacgcgccgcaatcatcggcacggtaacgctggagcgctcatgggcttccagcagttcgcgcacagcgttgtgcactgattcttggacccgggcactgcggccccccgggcgaaggccttctttaatcgccatgctggtgaccttaacacaaagaatttgctttaagcgctggccggtagcacactctgcaaaagcaaaatattagctttagcggagcgtgcgtatgtccagtcctgtttcccatcgttccagcctggtgttccttgcggtcactttgctgacgtttctcgcggcctccagtgcgccaacgccgttgtaccacctgtatcaggagggcctgcatttttcggcaggcatgctcacgatgatcttcggggtctatgccttgagcctgctggcggcgctgttgaccgtcggctcattgtcggaccacctggggcgcaagccggtgatttttgctgcgctgcttctgaatatgttggcgatgttgctgtttatcaatgaaggcagcgtggcctggttgattgccgcccgtaccctgcaagggtttgccaccggcatggccactgccgtgctgggtgcagcattgctcgacaccgaccgccagcaaggcccactggtcaacagcgtggcaccgcttttgggcatggcctgcggggcgatgggcagcagtctgctggtggagttcgcgccattgccgacccagttgatctactggacgctgctggccttgatgctgttgcaggccctctacgtatggcgtttgccggagacagtgagccgcatccccggcgcactggcgtcgctgcgcccgacgttgcacgtaccgccccaggcgcgccgggcgttgtggctgtcgttgccggtggatatcgccgtctgggcaatgggcgggttctatttatcccttgcgccatcgttggtgcgtgcggccaccggctccacctccaacctgatcggtggcggcctggtggccgtgctgaccctgagcggcgcgctgatgatctttaccctgcgcaatcgtgcggccgacaaggtgctgcgtctgggcgccggcttgctcgccatcggcgtgacgctgatcctcaccgccgtgcacagcgccagcctgccactgttcttcatcgccacccttatcgccggcagcggctttggtgcgggctttctcggcgccttgcgcagtgtggtgccactggccttgccccatgaacgtgccgggctgatgtcggcgttctatgtgctgagctacctggcgttctgcttgccttcattgctggcgggcaacctgattcgcagctttggcctgatcgccaccaccgacggctacggcgcagtcctcatcctgctggccctcggtgcgttggttgcgttgctgctgcaggattcggcgcgggtgagggcgacgaccggcggctgatgggtaataatcggtgcccgtattcgcctgatcgagattcaagtatgaagatcatccgcagcaaggacttcaccggcagtcgcgcttgggaggcgctggatattgccaacatgaatggcatcaccacgcgcctgcactggaccgaccagccgtaccgctggcacatcaatgacggtgaagaggtgtttgtggtgctggatggtcgcgtgcagatgcactaccgcgacaatggcttcgaacaggtggcggagctggaggtcggcgacatcttctacgccagtgtcggtaccgagcacgtggcccatccccaaggcccggcgcgcattctggtgatcgaatgcgaaggcagcgtttgacgctatatcggcaaaacagataacagttagagatattacccgttatatagatattcgatcaggttctatgatggcctcaacctcatacgagaaagaggagcgtcatcatgccctgctcgaataccctcagctacaaacccttcagtcacctggcccgtccacgggaagtgattcgccagttcacccccaactggtttgccgcgaccatgggcaccggcgtgctggcgctggccctggcgcaactgccggtcaacctgccaggtttgcacgccatcgccgaagcgctgtggttttttaccatcggcctgtttgtgttgttcagcgtgctgtatgcggcccgttgggtgatgttcttccacgaggcgcggcggatcttcgggcactccacggtgtcgatgttcttcggcaccatccccatgggccttgcgacgattctcaatggcttgctgctgttcgggttgccgcgttggggcagcgatgtgataccgctggccgaggccttgtggtggctggacgtggccatggccctggcctgtggtgtgctcatcccgttcatgatgttcacccgccaggaacacagcatcgaccagatgaccgccgtgtggctgttgcccgtggtcgccgccgaagtcgccgccgccagcggtggcctgctggcaccgcacctggcagacgcgcattcgcaactggtgatgctggtgaccagctacgtgctgtgggcgttttcgctgccggtggcgttcagcatcctgaccatcctgatgctgcgcatggcgttgcacaaactgccccacgccaatatggccgcgtcgagctggctggccctggggcctatcggcaccggtgcactgggcatgttgctgctgggcggcgatgcgccggcgatcttcgcggccaatggcttgccgggcgtgggtgacatggccaacggcctggggctggtggccggtatcacgctgtggggcttcggcctgtggtggatgctgatcgccgtgttgatcaccttgcgctacttgcgcgcgggcatcccgttcaacctgggctggtggggcttcacctttccgttgggggtgtatgcgctggccactttgaagttggcgagcctgttgcacctgggtttcttcagcgtattcggcagtgtgttggtggtggcgttggcgctgatgtggctgatcgttgccaggcgcacggtgcagggcgcctataaaggtgagctttttgtttcgccatgcattgcgggactagggaataagtaagcggagttaggtaaagtcgtggcctgataactattaggccacgcaggaacacggacgatgagccacccctcgcaattcaccttgctgcgcacacggcgtttcctgccgtttttcatcacccagttgctgggcgcgttcaacgacaacatcttcaagcaatcgctgatcctcgccattctctacaagctcaccatcgacggcgaccgttccatctgggtcaacctctgtgccttgctgtttatcctgccattctttctgttctcggcgctggccgggcagtttggcgagaaattcaacaaggacgcgttgatccgcgcgatcaagatcggcgagatcgtgatcatggcggtgggtgccaccggcttcctgaccaaccatctggaattgatgctgctggcactgtttgccatgggcacccactcggcgctgttcgggccggtgaagtattcgatcatgccccaggccctgcatgaagatgagctggtgggcggcaacggcctggtggaaatgggcacgttcctggcgatcctggccggcaccattggcgccgggatcatgatgtcgtccacccattacgcgccggtggtggccgtggcgattgttggcgtggcggtgttgggttacctggccagtcgcagtattccgcgggcggcggcgtcgaccccggggctgcgcctgaactggaatatcttcagcgagtcctgggccaccctgcgcctgggcctggggcagacgccggccgtgtcgcgttccattgtcggtaactcgtggttctggtttgtcggtgcgatctacctcacgcagatcccggcctacgccaaggaatggttgtacggcgacgagaccgtggtgacgttgatcctcaccgtgttctcggtcggcatcgcactgggctcgatgctttgcgaaaagctgtccgggcgcaaggtggaaatcggcctggtgccgttcggttcattcggcctgaccgtattcggcctgttgctgtggtggcactccggcggcttcccacagaacgtgcaggccaacgactggctcgccgtgctcagctatggccaggcctggtgggtgttgttggatatccttggcctgggtgtcttcggcggcttctatatcgtgccgctgtatgcgttgatccagtcgcgcaccgccgagaacgaacgtgcgcgcgtcatcgcggccaacaacattctcaatgcgctgttcatggtggtctcggcgatcgtatcgatcctgctgctgagcgtggccaagctgtcgattcccgagctgttcctggtggtgtcgttgctcaacgtcgcggtcaacgcctacatcttcaagatcgtccccgagttcaccatgcgtttcatgatctggctgctcagccattccatgtaccgtgtggagcaccgcaacctggaggcgattccggatgaaggcgcggcgttgctggtgtgcaaccatgtgtcgtttgtcgatgcgctgttgatcggcggcgcggtgcgtcggccgattcgctttgtcacgtactacaagatctaccgcttgccggtgctcaactttatcttccgtaccgccggggcgattccgattgcggggcgtcacgaagatattcagatctatgaaaaggccttcacacgcattgcgcagtacctgaaggaaggggaattggtgtgcatcttccccgaaggcaagttgaccgccgatggcgagatgaacgaattccgcggtggcgtgacgcgcattctggaagagacggcggtgccggtgattccgatggcgttgcaggggttgtgggggagtttcttcagccgcgatccgaacaaggggttctttcatcggatctggtcgcgggtggtgttggtggcgggtggcccggtggaggagccgacgcctgcgaggttgcaggaggtggtagctgggttgcgggggagtgtcaggtagttttgggtttggctgtactggcctcatcgggggcaagccccctcccacattttgactgtgttcacaaatcaaaggtgggagggggcttgctcccgatgacggtagtggctcaggtgctgatcttgaggccaatcagcccacagatgatcaacgccacactcgtcagccggaacaacgccatggactcgccaaacaggataatccccgcaatcacggtgcccacagcccccacgccggtccagatcgcataggcggtgcccagcggcagttccttcatggccagccccagcagaccgaggctgatggccatggcagcaatcgtcaaggcggtgggcagcggcttgctgaaaccgtcggtgtacttcaggccgacggcccagccgacttcgaataacccggcaaaaaacagaatgatccaggacatgatgacctcctaacgataggtggggtcgtccccggattaggcgcttgaagcgtcgcgaggtcgtccccgcgaagctcggtagagtgccgaaaagtacccggctgatcaagtttgcggcgtgttctccagggcgcgacggtcttccttctcgctcatgcggcgaaagtaggtcgacagcaatgccccggaaatattgtgccagacgctgaacagtgcactcggcaccgccgccaacggtgaaaagtgcgcactggccagcgcggcacccagcccggagttctgcatgcccacttccaacgccagcgacttgcgctgtgccaaaggcagcttgaacacgcggccggtgaagtagcccagcaggtagccgaaactgttgtgcagcatcaccacggccatgatcaacaggcccgattcggcgatcttcgcctgactggcggcaaccaccgccgcgacgataatcacgatgctcaccaccgacaccagtggcaatacatccaccgcatggcggacccgatcaccgagcacgcgttgcgccagtacgccgagcacgatcggcaacagcaccacctgcaggatcgaccagaacaactccatgaacgacaccggcagccaggccgatgccagcagccagatcagcgccggggtgagcagtggggcgaggagggtggtgacggcggcgatggccaccgacaacgccaggtcaccgcgggccagccaggtcatcacgttggacgacgtgccgctcgggcagcaaccgaccaggatcacgccgacggcaatttccggcggcaggtggaaggcctggcacagcagccacgccacacccggcatgatcacaaagtgcgcgaccacgcccagggccacgcgccagggatggcgggcgacctcggcgaagtcgtcgagtttgagggtcagccccatgccgaacatcaccaggcccagcaggggcacgatggcgcttttcaggccgatgaaccagcccggttccaggaaggcgacgacggcgaaaatcaacacccaataggcgaaggtgttgccgacgaagcggctcaaggcggcgagtgcgcgcatggggaggtcctttgttgttggattcgatcaaatgtgggagggggcttgcccccgattgcagtctgtcagtcaaaggtgttttaactgacagaacgctatcgggggcaagccccctcccacattttgatgtcacatggcttagatgccctgcggggtttcttcgccaccgagtgcttcaaccagcgccgggatgaaatcgccgaacgtcagcatcatcagggtgaagctcgcgtccagttggcccagggcttcttcaccgccgtcctgttccgcctggtcttgcagcaggtcttcgaacttcaggcgcttgaccgtcatcttgtcgtcgagcatgaaggacagcttgtcctgccaggccagggacagttgggtcacaactttgccggtggtcaggtgcagctggatctcttcgccggtcaggtcctggcgcttgcagcgcacgatgccgccgtcttcgtgggtgtcgcgcagttcgcattcgtcgaggacgaagaagtcatcggccggcttctgggtggtgacccagtcggtcatgatcgcggttggcgcggtttttaccgtgagcgggcgaaccggcagggtgccgatcacttcacgcagggtcgacagcaggtcttcggcgcgtttcgggctggcggagttgaccaggatcagcccctgtttcggcgcgatggcagcgaaggtcgacgaacgacggataaaggcgcggggcaggaacgcctggatgatttcatccttgatctggtcgcgttccttcttgtagaccttgcgcatttgctcggcctcgatctcttcgactttctctttaagtgcgtcacgcaccacgctgcccggcaggatgcgttcttccttgcgcgcggcgatcagcaggaagtcaccgctgacgtgaaccaggggagcgtcttcacctttaccaaacggcgcgacgaaaccataagtggtcaactcctggctggcacaagggcgcgccagcttggtggccatggccgcttccaacgcctcggcatcaacaggcagatcttgggtcaggcgatagataagcaggttcttgaaccacatggggtgagtctctcctttatacaaaggggggcattattctcttgataacgtcccaggccaaccctgcctaagccattggaagctatcaaaaaaaagatttaagaaagtgcttgccagacttaaggtcgctccgtagaattcgcgccacaccgaaacgaagggtgattagctcagctgggagagcgtctgccttacaagcagaatgtcggcggttcgatcccgtcatcacccaccattcgcttcatgtgttacgcgcagcggtagttcagtcggttagaataccggcctgtcacgccgggggtcgcgggttcgagtcccgtccgctgcgccatattcggtcacctggaacactgaacgccaggtaaccacaggaagcccgctcatcgagcgggctttttgctgtccagggtttgtaaaaccgaaaaaaacgccgccgatcatttccgatgatcggc

SEQ ID NO: 73 - DNA, 5092 bp, Pseudomonas nodulensis
tcgaactttcggttcatttcgtcttcacacaccgcaatctgatgctcgttagagtagtcaaattgcttgggtgttatatggtcaagcctcacgggcaattagtattggttagctcaacgcctcacagcgcttacacacccaacctatcaacgtcgtagtcttcgacggcccttcagggaactcaaggttccagtgagatctcatcttgaggctagtttcccgcttagatgctttcagcggttatctattccgaacatagctacccggcaatgccactggcgtgacaaccggaacaccagaggttcgtccactccggtcctctcgtactaggagcagcccctctcaaatctcaaacgtccacggcagatagggaccgaactgtctcacgacgttctaaacccagctcgcgtaccactttaaatggcgaacagccatacccttgggaccggcttcagccccaggatgtgatgagccgacatcgaggtgccaaacaccgccgtcgatatgaactcttgggcggtatcagcctgttatccccggagtaccttttatccgttgagcgatggcccttccatacagaaccaccggatcactaagacctactttcgtacctgctcgacgtgtctgtctcgcagtcaagcgcgcttttgcctttatactctacgaccgatttccgaccggtctgagcgcaccttcgtactcctccgttactctttaggaggagaccgccccagtcaaactacccaccatacactgtcctcgatccggataacggacctgagttagaacctcaaagttgccagggtggtatttcaaggatggctccacgcgaactggcgtccacgcttcaaagcctcccacctatcctacacaagcaaattcaaagtccagtgcaaagctatagtaaaggttcacggggtctttccgtctagccgcggatacactgcatcttcacagcgatttcaatttcactgagtctcgggtggagacagcgccgccatcgttacgccattcgtgcaggtcggaacttacccgacaaggaatttcgctaccttaggaccgttatagttacggccgccgtttaccggggcttcgatcaagagcttcgcgttagctaaccccatcaattaaccttccggcaccgggcaggcgtcacaccctatacgtccactttcgtgtttgcagagtgctgtgtttttaataaacagtcgcagcggcctggtatcttcgaccggcatgagcttacggagcaagtccttcaccctcaccggcgcaccttctcccgaagttacggtgccattttgcctagttccttcacccgagttctctcaagcgccttggtattctctacccaaccacctgtgtcggtttggggtacggttcctggttacctgaagcttagaagcttttcttggaagcatggcatcaaccacttcgttacctaaaaggtaactcgtcatcagctctcggccttaagatcccggatttacctaagatctcagcctaccaccttaaacttggacaaccaacgccaagctggcctagccttctccgtccctccatcgcaataaccagaagtacaggaatattaacctgttttccatcgactacgcttttcagcctcgccttagggaccgactaaccctgcgtcgattaacgttgcgcaggaaaccttggtctttcggcgtgggtgtttttcacacccattgtcgttactcatgtcagcattcgcacttctgatacctccagcaagcttctcaactcaccttcacaggcttacagaacgctcctctaccgcatcacttacgtgatacccgtagcttcggtgtatggtttgagccccgttacatcttccgcgcaggccgactcgactagtgagctattacgctttctttaaagggtggctgcttctaagccaacctcctagctgtctaagccttcccacatcgtttcccacttaaccataactttgggaccttagctgacggtctgggttgtttcccttttcacgacggacgttagcacccgccgtgtgtctcccatgctcggcacttgtaggtattcggagtttgcatcggtttggtaagtcgggatgaccccctagccgaaacagtgctctaccccctacagtgatacatgaggcgctacctaaatagctttcgaggagaaccagctatctccgagcttgattagcctttcactccgatccacaggtcatccgctaacttttcaacggtagtcggttcggtcctccagttagtgttacccaaccttcaacctgcccatggatagatcgcccggtttcgggtctattcccagcgactagacgccctattaagactcgctttcgctacgcctcccctattcggttaagctcgccactgaaaataagtcgctgacccattatacaaaaggtacgcagtcacagaacaaagtctgctcccactgcttgtacgcatacggtttcaggatctatttcactcccctctccggggttcttttcgcctttccctcacggtactagttcactatcggtcagtcagtagtatttagccttggaggatggtccccccatattcagacaaagtttctcgtgctccgtcctactcgatttcatgactaagagattttcgcgtacagggctatcacccactatggccgcactttccagagcgttccgctaatctcaaagccacttaagggctagtccccgttcgctcgccactactaagggaatctcggttgatttcttttcctcagggtacttagatgtttcagttcccctggttcgcctcttgcacctatgtattcagtacaagataaccatcttatgatggctgggttcccccattcagacatctccggatcaaagtctgtttgccgactccccgaagcttttcgcaggctaccacgtctttcatcgcctctgactgccaaggcatccaccgtatgcgcttcttcacttgaccatataaccccaagcaatctggttatactgtgaagacgacattcgccgaaaattcgaatttctcaactaagagaactcacaaattttaccttagcctgatccgttaccagtgaaagtaacgttcagtctatctttctatcacatacccaaatttttaaagaacgatctaatcaaagactagaaatcaacattcaccatcaccttgatggaatgctcatttctaagctttcaaaactttcagaagcagtagtggtggagccaaacgggatcgaaccgttgacctcctgcgtgcaaggcaggcgctctcccagctgagctatggccccgtatttctacaggcgtttcccacacaaaattggtgggtctgggcagattcgaactgccgacctcacccttatcaggggtgcgctctaaccaactgagctacagacccaatttcgggctgcttcttatcgtcttcttcaatgaatcaagcaattcgtgtgggaacttatggagcagctgatgtcgtcgattaaggaggtgatccagccgcaggttcccctacggctaccttgttacgacttcaccccagtcatgaatcacaccgtggtaaccgtcctcccgaaggttagactagctacttctggtgcaacccactcccatggtgtgacgggcggtgtgtacaaggcccgggaacgtattcaccgcgacattctgattcgcgattactagcgattccgacttcacgcagtcgagttgcagactgcgatccggactacgatcggttttatgggattagctccacctcgcggcttggcaaccctctgtaccgaccattgtagcacgtgtgtagcccaggccgtaagggccatgatgacttgacgtcatccccaccttcctccggtttgtcaccggcagtctccttagagtgcccaccattacgtgctggtaactaaggacaagggttgcgctcgttacgggacttaacccaacatctcacgacacgagctgacgacagccatgcagcacctgtctcaatgttcccgaaggcaccaatctatctctagaaagttcattggatgtcaaggcctggtaaggttcttcgcgttgcttcgaattaaaccacatgctccaccgcttgtgcgggcccccgtcaattcatttgagttttaaccttgcggccgtactccccaggcggtcaacttaatgcgttagctgcgccactaaaagctcaaggcttccaacggctagttgacatcgtttacggcgtggactaccagggtatctaatcctgtttgctccccacgctttcgcacctcagtgtcagtattagtccaggtggtcgccttcgccactggtgttccttcctatatctacgcatttcaccgctacacaggaaattccaccaccctctaccatactctagtcagtcagttttgaatgcagttcccaggttgagcccggggatttcacatccaacttaacaaaccacctacgcgcgctttacgcccagtaattccgattaacgcttgcaccctctgtattaccgcggctgctggcacagagttagccggtgcttattctgtcggtaacgtcaaaacaatcacgtattaggtaactgcccttcctcccaacttaaagtgctttacaatccgaagaccttcttcacacacgcggcatggctggatcaggctttcgcccattgtccaatattccccactgctgcctcccgtaggagtctggaccgtgtctcagttccagtgtgactgatcatcctctcagaccagttacggatcgtcgccttggtgagccattacctcaccaactagctaatccgacctaggctcatctgatagcgcaaggcccgaaggtcccctgctttctcccgtaggacgtatgcggtattagcgttcgtttccgaacgttatcccccactaccaggcagattcctaggcattactcacccgtccgccgctctcaagagaagcaagcttctctctaccgctcgacttgcatgtgttaggcctgccgccagcgttcaatctgagccatgatcaaactcttcagttcaaacatctttgggtttttaagaaaccctaaacttggctcagcaatcgttggttacatctttgatttctcgcg

SEQ ID NO: 74 - DNA, 1558 bp, Pseudomonas nodulensis; identical to SEQ ID NO: 29

SEQ ID NO: 75 - DNA, 1364 bp, Pseudomonas nodulensis
ttaatgagatggtcacccccaacaccctgtgagggctacgctttcacagggtgttttgttttcggaggccatcatcatgagcgagtcagcactgatcgggatcgatctcggcaaacataatttccaccttctcggccaagacaaatcgggccgcgaggtgtttcgcaaaaagctctcgcgagcgcagatgatgcggttcttcggcaacttgccgagctgcgtcgtggtaacggaagcctgtgccggctctcacttcatcgcccgtcagcttgcggcgatggggcatacgaccaagttgatttcaccgcagtttgtccgccctttcgtcaagggcaacaaaaacgactttatcgacgcagaggctatttgcgaggcggcttctcgtccgtccatgcgcttcgtcacgcctaaaaccgagtctcagcaaaccctgtctgttctgcatcgcatgcgcgagtcgttggtgcatgaccgcaccaagacagccaatcagatgcacggtttcctgttggaatttggcatcagcctgcccaaaggcttagccatcatgaagcgtttggcagctgttttggccgagcatgagctgcctgcgcggctgacagtgctgttgcaacgcctgcacgatcacttcgtttacctggatgaacggatcaaggaactggacaaagaactggcttgccagctggccgacgatgatctggggagtcgtttgcttagcatgccgtgtgtcggcccgatcaccgccagccttctggctgtagaaatgggcgatggcaagcaataccgatgcagtcgcgattttgcggcttcagtgggcttggtgccgcgacagtacagcacgggcggcaaagccaatttgttggggatcagcaagcgaggtgacaagcacctgcgacaactgttggtgcaatgctccagggtttacatgcagcggctggatcaccagaaaggggctttggccgactgggtgcgagcgctgctgcgccgacgacactcgaatgtggtggcctgtgccctggccaacaaactggcgcgtatcgcttgggcgatagcggctcatcatgcgcaatatgaagcagggccagacgccttgaacgcctgaccctgcggttgttgcagtaccacgactcacccttcaggttttgcgatagctgaacaacggatgacgtgaacggcctaccggcctggcgaagatcctgacataaaaatcggcttcagaagccgacgggtttttaaggatcgtcaggcgcgactctcatcgtggcgctggggcaagccccaaacagacgccggatagatttaagcaagccaaccacaccacccgttaatcagtattgcaaaaatgggggtgaccatagattttt

SEQ ID NO: 76 - DNA, 948 bp, Pseudomonas nodulensis
cataggtaccttgtaatccaacgcttgatgagggcgctgcaagttgtacacctcacgccatcgatcaaatgctatttgggcttccttgaatgtggaaaattgacggccatcgagcacttcggctttgagcgagcgatggaatcgctcgatcttcccattagtttgaggatggtaaggacggctgaagctgatccgaattcctaagcgaatcagccagatactcagctctgtaatttcccctggattacgtggtgagccccacggtgggccgttatcaacattgatacgggccggtaaaccgaaacgctgaaatacctcgacgatcttttccttgaccgtcgctccacgctcgttttcacaagcttgaatagccaaattgaatcgtgagtgatcgtctagcaaggtcaggggatggcatcggccttcttgtgttgcaaaatgccctttgaaatccatctgccaaagatcattaggggcatcatgctcaaacctgtgcattgcctcctgttccttcggaacgggctgaatcagcccatggcggtgcaaaacattagtgacagtgctgggagcaattcgctgtttcaagaggctgctgatcgtgcgcccaccccatgccggatgtgcttgtctgagcgctaaaacttccgactccagacgtgccggggtcagcctaggactggaaataggttttcgggacttgtcctttagccctgactggccttgcgactcgtagcggttaagccacttataggccgtttgagggctaatgccgaaccgccgacacagctctcgtttattactgccgggctgccgtgctaaggaaacaaactcttctttcaggctcatggtatctctcgtgtcccaaggcatgatgatttcccggcgaagtttatccgccgaaaagtgtccaccatgtccccgtacacccgtcaaccatgtgtccggtcc

SEQ ID NO: 77 - DNA, 86370 bp, Pseudomonas nodulensis; identical to SEQ ID NO: 2
  misc_feature (31418)..(31493): n is a, c, g, or t

SEQ ID NO: 78 - DNA, 326801 bp, Pseudomonas nodulensis
  misc_feature (264053)..(264130): n is a, c, g, or t
tgtttgccgagatcgatcccgatcagtgctgactcgctcatgatgatggcctccgaaaacaaaacaccctgtgaaagcgtagccctcacagggtgttgggggtgaccatctcattaaccggggcggttcttgtaggaaccgtcccggtttttttgtgcgcgacggttaagccggctgttcttccttgcccaggcacgcggcggcggtgaacaacacatcggtggacgaattcagcgcggtttccgccgaatcctgcaacacaccgatgatgaaaccgaccgctaccacctgcatcgcaatctcactgggaatgccgaacaggctgcacgccagcggaatcagcaacaacgaaccgcctgccacgccggaagcaccgcacgcacagatggccgcaaccacactgagcagcaccgcagtgggcaggtcgacggcgatgcccagggtgtgcacggcggccagggtcaacacggtgatggtgatcgccgcgccggccatgttgatggtggcacccagtgggatcgacaccgagtaggtatcttcatgcaggcccaggcgtttgctcagcgccaggttcaccgggatattggctgccgaactgcgggtgaagaacgcggtaatgccgctctcacgcaggcacatcagcaccagcgggtaagggttgcggcgcagtttccagaacacgatggccgggttgatcaccagcgccacgaacagcatgcagccgatcagcaccaccagcaggtgggcgtagccgagcagggcaccgaagccggaggtggccagtgtggaggcgaccaggccgaaaatgcccagcggtgcaaagcggatcaccacgcgcacgatcagggtcacaccgttggacaggtcttccagcaccgcccgcgtggtcggcgcggcgtggcgaatggcaatgcccatgccgatggcccacgccaggatgccaatgaagttggcattcatcagcgcgctgatcgggttgtccaccacgctcagcaacaggctctgcaacacttcgccgatgccgccgggcgcggtcaccgctgcgtcatgggtcgccagcaccagcgaagagggaaaccacatgctggcaaccactgccaccacggcggcggcaaaggtgcccagcaaatacaggaacaggatcggcttgatatgggtttcctggccatgcttatggttggcaatggatgccatcaccagcacaaacaccaggatcggcgccacggccttgagcgcggaaacaaataccttgccgataaacccggtggagcgtgccacttcggggagcagcagggccaacaggatgccggcgatcaggccgatgacgatttgcgtgaccaggctgacgcgggccaggcgttgcaggagagagggggcagcagtcataaacacttgtctctagtttttttagggcgcagctactgactcggaaagggctgtaggacgcggatcgcgaagtctagcatgctgtgggaaaagtccttggcggtgcggcattgcgtcacccgcttgcccaggccttggccaaatctggacatactctgataagattctgttctctcatctttcctctccgtcagcgggcccttcgggttgtcgttgatgtcgtcgtttctggagttttcatgttgtttcccatcctgctgctgtcagccgccggctttaccgtgctgaccacagaattcgtgatcgtcggcctgttgccgtccatcgcccgcgacttgaatgtcagtgtgtcccaggccgggctgctggtgaccttgttcgcgtttaccgtggcggcgtttggtccgtttctgacggcgtactgtgcacgtttcccacgcaagcgcctgtttatcagcatcctgatcctgttcggtgtggccaataccgtggcggccctggcaccgaacatctgggtgatggcgctggcacggttgatcccggcgctgggtttaccggtgttctgggccctggccagcgaaacggcggtagacatcgtcggccccgaattcgccgggcgcgccatcgagaagatcggctttggtatcgtctgcgccacggtattcggcattccggtgggcacgctgatttcagatatgttcggctggcgcagcgcgtttgccatcctcgcggtgatcgcgctggccaaggccttgctgctgtctatctacctgccggtgacccagccgaagaacgatgaagtgacgttgcgcgcgcagttcaagatcctgcgcaacccgctgatgcaggggcatatcctgctgtcgatcctggtgttcagcggcatgttcacggcgtacacctacctggcggacatccttgagcgcctggccgggttcgacggcacgctggtgggctggtgcctgatgggcttcggtgcggtcggcctgatcggcaattcgctgggcggacgggcggtggatcgccacccgttgatcgcgtccatggtgttctgtgggttcatgatcgccggcatggtcgcgctggtgccggcgattcattcgagcatcggcctggcggcggcgatggccgtgtggggcgtaacccaggcggcgatgttcctggtcagccatgtgcgcctgatgaaggccgcgccccatgcgccagcgtttgctgcgtcgctgaacatcgccggggccaacctgggcatcggcctaggcgccatggtcggcggccatgtgatcgacaccctcggcctgggcagcctgggctttgcggcgtccgggtttatcctggtgtcgatcctgctggcgttgtggctgatgaccgccaagcaaccgctcacctccggcgcctgagccgtcagggcagggtggtgaatagctcgcgccgggcaccttcggtaatcgccacgatgccggggtgcttgaccttgcgttccaccgagatcgcgtagaacgactcggtcacggccacggtttggccgatcagcgccacgccgtactggcgcaccacctcgtcggcaatcacgctgggggcgataaagatcccgctgccggattggccgaatgcctgcatcaaggcgctgtcgtcgaactcgccgatgatcttcggttgaatctgttgctcggcgaaccagcgctgcaaacggctgcgtaccacggtttccgcgcccggaatcaatagcggcgcgccgtgcaggcactgcgggaaatcccctccgtattcgtcagccagggcctgggtggcgaaaaagctgatgccacattcgcccaacttctggctgtagcccttgatgtctaggtgcgtgggcatggggctgtcggaaatcaccaggtccaggcgctggattgccaggtcggccaacaggcgttcgagtttgtcttcgcggcaggtaatgcggatcggctcgctcaactccatggtcggtgcgatcagccggtagacgatggacttgggcaccacgtccgccacgccgacgcggaacaggatctgctgttcgtcgggctgcgcgcgcagcatcgcctccaattcattgccggtctggaacatctgctcggcatagggcagggcctggcgcccggcttcggtcagttccagctgccggccaacgcgctgaaacagcgcgataccgaaggtttgctccaacaggctgatctgcccgctgatggtctggggcgtgaggttcaactgctcgcacgcacgcacgatgctgccggtcttggccaccacccagaagtagtgcagttgtcgataattgagcatgctcaccatcacatcgtaaaaatcgaagtatacgcgagaaaaatacgaattttactgaactgtttgcctgcatagaatgcctcgctatcgcggggccactatttggacccaagagttctaacgaggaagacatcatgaaactcaattctctgggcgcggcatccttgcttgcgctttcattggtagtggtcagtggttgtgatcaggtcgagaaaagcgcacagcaggtgttgggcaaggccaccgaatcggccaagcaagcgatcgatgacacccacaaggctgccgaacaggcattgagtgaagcgaccaacggcctgatcaacccgcagaagaaggatgatcaggaagagaacgaaaccgaatcgaacagtaaagaagcctaaattcccgctcaacgtcaggactgacctatggattaccttttacaactggccgccagccccaccgcctggattgccctggcaaccttgatcgtgatggagatcgtgctgggcatcgataacctgatcttcatctcgatcctcaccaacaagttgccagaaaagcatcgggccaaggcgcgacgcatcggtatcagcatggcgttggtgttgcggttgggcctgctcagcaccatcgcgttcatcgtgcaactgacggcgccggtgttcgaagtgttcggccaggcgttttcgtggaaggacatgatcctgatcgccggtggcctgttcctggtgtggaaggccactaccgagatccatcacagcatggacccggagcctgaagagaaggaaaccaacgccggcaacgtcgtggctatcggctttgccgcggccatcgggcagatcctgttgctcgacctggtgttctccatcgacagcatcatcaccgccgtgggcatgaccgagcacttgccgatcatgatcattgccgtggtgacctcggtgatcgtgatgctggtggcggccgaaccgctggccaagttcatcaacgacaacccgaccgtggtgatgctggccctgggcttcctgatcatgatcggcatgaccctgatcgccgaaggcttcggcgcccatgtaccgaaaggctacgtatatgcggccatggcgttctcggcagccatcgaatgcttgaacattgcccggcgtaaccgccaccagcgtttgctcgctgcccggcagtaaccgctgaaaccaaacggccggctgcgctcagatgagtccagccggctttttgctgtctgttagaattcgcgcacttgatagcgtgaggtcctacatgaacgagccgattcgtcttacccagtacagccacggcgcggggtgtggctgcaagatatcgccccaggtgctggaagtgatccttgccggcagcggcgcacagaacctcgaccccaagctgtgggtgggcaacgcctcgcgtgacgatgcggcggtctacgccatcgacgacgagcgcggcgtggtctccaccaccgactttttcatgccgattgtcgatgaccccttcgatttcgggcggattgccgccaccaatgccatcagtgatatctacgccatgggcggcgatccgctgatggccatcgccattctgggctggccggtgaacgtgctggcgccggagattgcccgcgaagtgatccgtggcggccgttcagtgtgcgacgaagctggcattcctctggcgggtggccactccattgatgcacctgagccgatcttcggcctagccgtgaccggcatcgtgcaaaaacgccatatgaagcgcaacgacacggccaccgccggttgccggttgtatctcaccaagcccatcggcatcggcatcctcaccaccgccgaaaagaagggcaaattgcgcgaggcggatatcggcctggcccgcgactggatgtgcactctgaacaagcccggcagccgtttcggcaagttggcgggggtaacagcgatgaccgatgtcaccggtttcggcttgttgggccacctggtggaaatggctgacggcagcggcgtgaccgcacgtatcgaatacgccaaggtcccacgcctggccgggatcgaggactacctggatcagggctgtatgcccggcggcactttgcgcaacttcgatagttattcgagcaaggtgggacgcttgcaggaactgcacaaacgcgtgctgtgcgacccgcagaccagcggcggcctgttgatcgccgtcacgcctgagggcgatgccgaattccacagcgtggcgactgaactgggcctggtcctggaacctatcggcgaactggtcgagcgacagacccacgcggttgaggtgatttgatggcaaccgatatcaccgactaccgcgacattttcctcaacgaccggccgatgatggatacccgcgcgccggtcgaattcagcaagggcgcgttcccgggggtgatcaacctgccgctgatgaccgacgacgaacgccagcgcgtcggcacctgctacaagcagcagggccagcaggccgccatcgtgctcgggcatgagctggtttccggcgcaatcaaggccgagcgcatcgagcagtgggcgcggttcgcccaggccaaccccgagggctacctctactgtttccgtggcgggctgcgttcgcagatcgtgcagcaatggctcaagaccgaagccggcatcgagtatccccgtgtcggtggcggctacaaggccatgcgtacgtttttgctggagaccgtcgagcacgccgccacgcagtgtgacttcgtgctgctgggcggcatgaccggtactggcaagaccgaagtcctcggccagttgcgcaatgccctggacctggaaggccacgccaaccatcgtggctccagcttcggcaagcgcgccacggcgcagccgtccaacatcgacttcgaaaaccgcctggccgtggacctgctgaaaaagcgtgccgcgggtatcgagcagttcgtggtcgaggatgaaagccgcatgatcggcagttgcgcgctgccgctggcgttgcacaagggcatgcagacgttcccgatggtgtggctgcaggacagcgtagaggggcgggtcgagcgcatcctgcgcgactatgtggtggacctgtgcgccgaatttgtcgaggtgttcggcgatgccggccaggcgctgttcgccgagcgcctgacccagagcctgggcaatatccataagcgcctgggcggcgaacgcttccagcgcttgcaggcgatcttgcaggcggccctggcggagcaggcccgcagcggtgatgtgcacctgcatcgcgcctggatcgaagggcttctgcgtgaatattatgacccgatgtacgccttccagcgtgaaagcaaaggcgcacggatcgagttcgcaggggagcagggcgccgtggtggaatatttgcgcgagcgcgcgctgatcagaggatagccgcgccgatcaacccacacaccacccccaccaacatcgttaagcctgccaccgtcaccagcacccgcgcatcgaagtccttgcgcagcatcagcagggacggcaagctcacgctcggcagggtcatcagcaaggccacggccgggccggtgcccatgcccagggtcatcatggtttgtacgatggggatttcggcagcggtgggaatcacgaacaacgtgccgacaatcgccagcggcaccagccatactaggctgttggccatggcgccgtcgacatgggggaatagccacacccgtgcggcacccaggatcaacacggccaggatgtacaccgggatcgtgctccagaacaactgccacagggtccgcagccaacggccgaggaacggctgggactcaaccgcgctgacctcggccactgcgcccagcgccgcttccggcacctggtccgggcgggcgatacgttgcgcgatcagcgacacgcccaccaccagcacaatgcccgccaccagccgcaatgcggtgaagccccaacccagcacaaagcccatgaacaccagggtcgccgggttcagcaccgggttggcgatccagaacgcgagtgccgcgcccaccgatacctgctgccgacgcatgccggccgcgaccggagccgcgcagcaactgcacatcatacccggcagggcgaacagcccgccgcgtacagtcgaacccagcccggcacggccgaacaggcgcagcagccagtcgcgggggatcagcacttgcaggagggagcccaggatcaccgccagcacggcagccttccagatcgccaggaagtacacctgggcatacgccagcgcagccgccagtggcgagctttgctggtcgttgagaatcgaggcgccaatgctgtggttatcggcggcgacgaaggccttgaagtaatagggcgaccacttcacgtagtagaggccgacgcaggcgaccagcaggaacagcgctggtttccaccagaacgaccagccccggttgggctgggtggaggcgaggttgggcatggtgatgatccgcagatgagtcaatagcggcgcatcatacgccctcagctctcggcgctcacctgggtaggttgcgggcaggtttcttcgccattgttcaggccctgcttgtagttgcggctcagcagcgaggccttgccgttgtgccaggtcagtgtcagcacatacagcgtgtcgtagtcgctgccggaccagtcgtcggtgatggtgtgtttttcgccggacgcttcgctcgccaccttgttgatcagctccggcaggtagccgtgggaccaggcggtgtagatgatggagttgtggtacttgtcttcgaccagctcgtcggcgagggcactggtgtcattcgcggaaaacttgatgttgaccggcaggccgagcttgatcgcgctggggctgatggtcatcagcgggcgaatatagctgtaggaattgtccagctcgccttcctccacattgcgtgtcgggttggcggcgaagacgaaattggccttgccgaacttttctggcaaaaccgtggccaggttcatcgcccggttgagaccctggcaattgagctggcccaggccaccggcgggtttttcaccgtggcgcaggaagaccagggtttgcacgccgtcaacctggtcggcgttgctgatccgtgactccaggctcagatcgatagcgccgccgaccaacaatagcggcaacaaaatgtaggaatagcgtttcagtcgttgtactaggcgcagaggcttgatcgtcattgtaggttcgagtcttcatgcgtcacgttaaggcagacacgcctggccacgatgacgcctggggcgcctgcggtgttccatgtcgaaataacgaggtgcctccattcaccgcttgagcgcagttaagagtgcccaagggcgtattggttcgccctaacgggataatagccagcagttgttgcgtattgatgacccatgcaggacgctcgccagatgactatcatgggggctttcagcacacacatagggcttcccgatgaacccacttgccgctttcccgatcaatagcaaatggcccgcccagcatcccgagcgcctgcaactgtactcgctgccaacccccaacggggtaaaagtgtcgatcatgctcgaagagctcggcctgccctatgaagcgcataaagtcagcttcgagacccaggaccagttgtctcccgagttcctgtcgctgaaccccaacaacaagatccccgcgatcattgaccctaatggccccagcggccagccgctggcgttgttcgagtccggcgcgatcctgatctacctggcggaaaaatccagccagttgctctccgaggacccggcgacacgttatgaaaccattcaatggctgatgttccagatgggcggcatcggcccgatgttcggccagctgggcttcttcaacaaattcgccggcaaggcctacgaagacaagcgcccgcgtgaccgttacgccgccgaatcccggcgcctgctcgacgtgctggaaaaacgcctgctgggccgtacctggatcatgggcgacgagtacagcatcgccgacatcgccacctttccgtgggtccgtaacctgatcggtttctacgaatccggtgacattgtcggcattgccgactttccaaacgtactgcgcgcgctggatggtttcgtcgcacggccggcggtgatccgtggccttaatattccgagttgaagcatgccgactttcgatttcaaacagctggacgtgttcagccgcgtgccgctcaaaggcaacccgctggcagtggtgttcgctgccgacagcctcagcgaccaacagatggcggatttcgccaactggaccaacctcagtgaaaccacgttcttgctgacgccgcgtgatcctcgggcggactaccgggtacggattttcaccaccttgacggagctgccttttgccgggcatccgacgttgggcagttgttatgcctggctgcaggcagggggtgttcccaagggtgaggagataatccaggagtgcgaaatcggcttggtgcgtatccgtcgccaaggcgatgaactggcatttatcgcgccgccgttattgcgcgccggtgccgtggacgcgccgttgctggagcgtgtgcgcctgggcttgggcctggagcccggggtcattgtgcgcagtcagtgggtggacaatggcgccggctggctcgcggtgatgctggcagaccgcgaccaggtcctggcgttgcagccggactatgcgcaactgttggggctggccgtgggtgtgatcggcccctgtgaagccgggcgcgacgatgtggacgcgcaatttgaagtgcgtgcctttatcgccggcgacggcgcccaggaagacccggccaccggcagcttgaacgccggccttgcgcaatggttgctcagcgagggcctggcccccgagcgctacgtggtcagccagggcacggctattggccgggcagggcggatcggcgttgagcgccagggcgatgaaatctggatcggtggtgctgtttcggtgtgcatcgacgggcgtgtacagctctagatcaataaattgttaccgcccacgcaatacactattggcccctcggcgtttgtgctgccggggcctgggggcataagctttcgccccaaagattttctgccttgcgataggaccaccatgaccagccagttcccccaagcccgtccacgccgcctgcgccgctccccggagctgcgtggcctgttccaggaaaccgaattcaccctcaacgacctggtgctgccgattttcgttgaagaagaaatcgacgacttcgtgccgatcaccagcatgccgggcgtgcagcgcatccctgagaagaaactggccggcgagatcgagcgttatgcccgtgccggcatcaagtcggtgatgaccttcggtgtgtcccaccacctggacgccagcggcagcgacacctggaaggagcgcggcctggtctcgcgcatgtcgtcgatcatcaaggatgccgtgccggaaatgatcgtgatgtccgacacctgcttctgcgaatacaccgaccatggccactgcggtgtgatgcacggcgcccatgtcgataacgacgcgacgctggttaacctcggcaagcaggccgtggccgctgcccgtgccggtgccgatgtcattgccccttcggcggcgatggacggccaggtccaggcgatccgccgcgccttggacgatgcgggcttcacccatatcccgatcatggcttactcgaccaaattcgcctcggccctctacggcccgttccgcgaagccggcggcagtgcgctcaagggcgaccgcaagagctaccagatgaacccgatgaaccgccgcgaagccgtacgcgaatcgctgctggacgaacaggaaggcgcagatgcgctgatggtcaagccggccggtgcctacctcgacatcatccgcgacatccgcgaagcctcccgcctgccggtagcggcgtaccaggtgagcggcgaatacgcgatgatcaagttcggcgcccaggccggggcgatcgatgaggaccgtgtggtgcgtgagaccttgggctcgatcaagcgcgcgggtgcggacttgatcttcacctacttcgcgatggacctggcgttggccgggatctagaaccacaacaggtaaaatgtgggagggggcttgcccccgattgcgttggatcagtctacacatacagtgactgatactccgtcatcgggggcaagccccctcccacgtcaaccatgcccggcccgtcgtcgcccaaggaagccccatgtatccacgccgcctgatcctgtgccttgccacgtcgctggtactggccggttgctccaccacgcgcaacccgcaacagccgcagcgcagcgaggccgaggtgaaggcgcaggtcgtgcgcctgctgccggtcaaggtggctgatcgcgagggctgggcccaggacatctacacggccttcaacacccagaacatctaccccagcacggaaaacatctgcgccgtgctggcggtgaccgagcaggagtcgacctatcaggtcgacccgccggtgcccaacatgggcaagatcgcccaggacgaaatcctgcggcgtgccggcaaagtccatgtgccggcgtttgtcgtgcgcagcgccctgcaactgcgctcacccagcggcaagacctacgccgaccgcctcaatgctgcgcgcacggagaaggacctgagtggcatcttcgatgacttcatcagcatggtgcccctgggcaacacgttgtttggtggtttcaacccggtgcataccgcaggcccgatgcaggtgagtatcgactttgcacagaaacaggcgcggagttatccctacacggtggatggcacaattcgtcgcgaagtcttcacccgtcgtggcggcatgtacttcggcatcgcgcacttgctgggttacccggtgagctacgaccggccgctgtatcgctttgccgatttcaatgccggttggtacgccagccgtaatgccgcgttccaggctgccgtcagccgcgtctcgggcaccgaactggccctggatggagatctgattcgctacggctcgctgctgcccggcaccaccgagttggcggtgcgttcattgggcgcgaagctggacatgcgcaaccccagcatccgtagccagctggagcagggcgagcaactggatttcgaggaaaccaccctgtacaaacgcgtgtttgccctggccgacaaggccgccggcaagccgatgccacgggccatcctgccgggcatcgtgctcaagagtcccaagatcacccgtaacctgaccacggcgtggtttgcccagcgggtggatgagcgctatcagcgctgcctgaagcgctgatcaggtgcggcgtttgacaaaacgccgccacagccacacccacaaccacagcaccgggaacgccaggatcacgaacggcagcacatagcttgatcgctccaacgcgtcggcggtgccgtcgaccaggttgtcgcccaggttgctgaacaccctgctgaaccgtgattgctgattcgcaccatcagaggagcggaaattcagcgtcacccggttagtgtccaggcgacgttgctggctggcagcaacctgggccagttcctgtagctcgttttctatgccggcctgttccttgctcaaggcgatcaggtcactgacggtgatgtccttgcgcttggccaactcatccagtcgttgttgttgagcctgcaggcggtcctggcggcggcgtacgtcggcgacggcatcggccaggtcctcggcggtggtgatgcgctggccgagtgtgccgccttcagccgccatggcgaccatcggttcgacaccggttggcgcgatgcgcaggatgatctggccgccactgccgtcttcggtgatgccgaggatattgcaggcgccaaagcgcgcggtttcgcaggcttcgcgggtggcctgcatgcgcggcgcgagcagtgcaccaggcagggccaggctcagctcatgctcgtaggccagttgcgcgcccgcgcggctttgttcgccgttgattacccgtgcgcgggactgatccttgggcgaacagccggcaacggccagcgctgccagcaggaacaggagatagggttttggcttgccgtccagatggcgcattgcgattccttggcaggtacgggggaatttgacggcgattaaagcgggtctgatggattaacgcaaagcatcggaggggatttgtgcggctgatggtgatggccgttgtctggcgccaggcgtacacctcaagcctgacaccaaggaagaattcgccatgatcgctcacgccgtgcccgaagggtttgtctcgttgccccgcagtagcccgctgcttgacctgcttggcccggcgtattgccggggagaagggctgcaactggaaatcggcctgcgtgccgacaaccgccacgccaatgggcgcggtaccgtgcatggtggggtgttggcaaccctggcggatatcggcatgggctacgcgatggcgttttccagtgagccgccgctgccgctgattacggcgagcatgaccgtggactacctgggggcggtgcaggtgggggagtggattgtggtgcgcctggagcatcacaaacgcgggcggcagatggcgtttgccacggtgagcctgcaggtgggggagaaggtgatggcgcgggcgaatgcggtgtttgcggtgccgcagacgcgagattgaagggtaaagaaaaggcctggttttcgtggaaccaggccttttctgcgttgctcttttttctagagggctgctgcgcagcccgacgcggggcaagcccgctcgccacagcaagctagctcaccacggcgagcctgcgcctaccgtcaggcgcgttcgagggcgagggctacgccttggccgccgccgatgcacagggtcgccaggcctttcttggcatcgcgcttgatcatttcgtgcagcagcgttaccagcacgcggcatcccgaggcgccgatcgggtggccgatggcgatggcgcccccgttgacgttgaccttgtcggcgtcccattccagctctttgcccaccgccagggattgcgcggcgaaggcttcgttggcttcgatcaggtccaggtcgcccaggctccaaccggctttgtccaggcaacggcgggtggccgacaccgggccgatgcccatgatcgccgggtcgacgccggcgttggcgtagctggcaatgcgcgccagtaccggcaggccgagggccttggccttgtcggcgctcatcagcaacaccgcagcggcgccgtcgttgaggctggaggcgttgccggcggtgacgctgccgtctttcttgaacgccggtttcagcttgcccagggattcggcagtggtgccggcgcgtggctgttcatccacggcgaaggccaccgggtcgcctttgcgctgggggatcaggatcggtgtgatctcatcgacaaaccgccccgcctcgatagcggcagcggctttctgctgggaggcagcggcgaacgcatcctgggcttcacggctgatgccgtacttgtccaccaggttctcggcagtgatgcccatgtggtaatcgttgaacgcgtcccacagcccatcggtgatcatgctgtcgatcatcttggcgtggcccatgcgcaaaccggtgcgcgcggcgggtagcacgtacggagccaggctcatgttttccatgccgccggcgatgattacctcggcgtcgccgcaacggatggcctgggcgcccaggtgcagggccttgaggcccgagccgcagactttgttcaaggtcaggctgggcaccgcgtggggcaggccggccaggatcgacgcctggcgcgccgggttctggcctgagcctgcggtgaggacctggccgaggatcacttcatccacttcggccgggtccaggccggtctgctccagcaggcgacggatcacggcggcgcccagttccggtgccggaatgttcgccagcgaaccctggaagctgcccacggcggtgcgggtggcagcaacaatcacgacgtcttgcatggaatctgtcctcactggaagtgcatttctggaacgtggtccgggacgatcagtttaccggcggtcttgctcactatctcttcaacgctgacgccaggtgcgcgttccttgaggacaaaagcgccattttcgatttccaggtacgccaggtccgtcaatacgcgcttgatgcagtgggcgccggtcagcggcaggctgcattggctgagcagcttggactcaccgtccttggacgcatgggtcatgatcacgatgatgttttccgcaccggccaccaggtccatggcgccgcccatgcctttgaccagcttgccggggatcatccacgaagcgatgttgccttgtacgtcgacttcaaaggcaccgagcacggtaaggtcgacgtggccgccacgaatcatcgcgaacgactcggcggacgagaagatcgacgcgccgatacgcgcggtgacggtctgtttgccggcgttgatcatgtcggcatcaatggtttcttcggtaggaaaaggacccatgcccagcaggccgttttccgattgcagcatcacttccatgccttcggggatgtagttggccaccagggtcggaatgccgatgccgaggttgacgtagaagccgtcctgcatttcgcgggcgacgcgttgagccatttgttcgcgggtaagagccattttatgtgtccttattgttcgggctggaggcggattacttgcgcacggtgcgctgttcgatgcgcttctcgaacgtgccgcagatgatccggtcgacgtagatgccaggggtgtggatctgcgccgggtccagctcgcccggttcgacgatttcttcgacttcgaccacggtgatcttgccggcggtggcggccaacgggttgaagttctgggcggtgtggcgatagatgacgttgccgaagtggtcggctttccagcctttgacgatggcgaagtcgccggtgatggattcttccatcaggtacgggcgaccgttgaattcgcgggtttccttgccttcggcaaccggggtgccaacgccggtggcggtgaagaaggccgggatgccggcgccgcctgcgcgcattttctcggccagggtgccttggggggtcagcaccacttcgatttcgccgctgagcagttgcttctcgaacagggcgttttcaccgacgtaggaggcgatcaccttgctgatctgtttttgctccagcagcacgcccaggccaaagccgtcgacgccgcagttgttggaaaccacggtaaggtcgcgggtgcctttgcgcttgatctcggcaatgaggttttccggaatgccgcacaggccaaaaccgccggagagtacggtcatgccgtcctccaggcccgccagtgcttcctcgtaggacgccacgcgtttatcgaaacctgccatatgcacctcttttattgtttgtgggccagccaatgaatcgagtgttgctccgtcggattgatttgttaagttgttttttaaggttgattgatttaaaaaacagcatagttgcctggccgtttggagtagcgtcatgacagttaaacagatgcgcgcgtttctcgctgtggcccagagcctgagtttcgccgccgcctgcgagcgcctgcacctttcacagtcggcgctgagcctgaccatcaagggcctggaagaaggcctgggtgggcggctgttcagccgtaacacacgcaatgtcgcgttgacgcccgaaggtgaatcgctgctacccctggcacgccggctcattgccgattgggacaatgccgaggacgaactgcgccagcgctttaccctgcaacgcgggcgggtcacggtggcggcgatgccgtcgttcgcgggcaacctgctgccgccgatcctgaagatattccgcgcgcgttaccctcaggtgaatgtcaccgtgcacgacctgatcaacgaacaggtgctggaaatggtccgcgaccgccaggtggagctgggcgtggcgttcgagccttcagacggttcgtcgctggcgttcacaccgttgtatctggatcgcttcattgccgtggtgcccggggattcgccgttgattgagcttgatgaaatcgactggaaaaccttgctggagcagccgttcatcactttgcagcggccgtccacggtgcgggtgatgttggaagagcaccttggtgctctacagatgaagctgccggtagcgctggaaagccatcaactggcgaccgtaggcaagatggtggcgatggggttgggtgtcagtgccgtccctgcattgtgtgcgcggcagatggaggaggcgggggctcattgcatcaccttgcgtgatccggtgatcgaacgaccgattggggtgctgaccaaacccggtcatgaactctcggcggcagcgcaggtgttgtttgatatcttttgcgacgaagcgaagaagggacgatttcccgcagtgtgatagagccgaaattaaaaagcccgctcgaatgaacaagcgggcttaagtagttaatgcggtgttatcagcagtatctatcaatcactttaacttgcgattggcccttgaggttctgccattcggtattaagtgtgtggaagacctgttcgataaagttgcgatcggcggccgccttcttgccgacataaccctggccacggcggtacatcttcaggcgcgccgccagttcacggttattgcggtcaaactcggcttcttcggtgtggggcgccaggcagtcaatttgcacttcgcccgatttgccaatccacaggatatggtcgtcgagtgtgtctttctgcgctgcgaacatctcagccaattcatcgatagttggttggttgttcagattcatgtgtaagccccttgaccagttggcgatctatcagttggttcgttaatacttcgtaagttgtctccggttgcgaaaaccgggcgtcagcgactgtctgccgaatacgggcagggtcttgaacctgatgcatgtagtcttgctgatgaactgctacgcaatgctttcataacgaagacaagccgcatttgagcgccttgtaccgaacccttcgggccggtcagcttcatcaatccgccttgtgggcagtgcacatccggaaaaaacagctcggcggtcagacgagcttgttcaaaacgcttgttgccaacgctcccgatccgggagacgtctcgataatgcaaggacaaaatggttacgtcaacggttatgtagtgattatttttgctcactacataaattgccgtggggacgggagaatgcgggaaagcgtgacttgggcgtcattttctggaagtacaggtcaggctgtctaacgcctgttgtggcaagcccactcaccacaacaagcccgctcgccacaaaggacctgcgcttgattgagttaccgtaaccgttcgaccaaacgcggcaaaagccgctcgcattcggcttcgatcttcacctgcaacaactcatccccccgagtcttgcccaagttgatggcaatgaccggcttgccctgttcgaccatggccttgcacaagcggaatgccgaataggccatcagcgacgaaccgactaccagcaagccttcggcatggtcgacggcggtcatggctctggctgctgtcgccggtgctacgttttcaccgaaaaacaccacatccggcttcaagcgctcgccatcgcaatgggggcagtgggggacctgaaagtgttcttcaaaggcaggatcaagcaacgtgtcgccatccggcgcctgcaccgcatggacctgcgcaaggtaggggttgtcgatttccatccggcgctggatcacatcgcgtgcactgcgcaaccggcaatccaggcacagcacccggtgcaggctgccgtgcagttcgatcacatcgtggctgccggcctgatcatgcagggtgtcgacgttttgcgtgattagcccgctgatacgcccgtgttgctgcagcgtcgccaacgccaggtgcgccttgttcggctgcgcaatgcgaactctcggccacccgagcatcgcccgcgcccagtaacggcgacgtgcctgcgcggtggcgaggaactcctggtacatcatcggcgccttgccccggcgcacgccttcactgtcgcggtagtcgggaatgcccgacgacgtgctgatccccgcaccggtcaacaccagaaagtgccgttcggccatggcccgatgcaaggtgtcgaggtgatcctcttggtgttccagggtgtcgagcatgggttcccctattcgccgcggatgtactgctccagctgtctgatcaggtcagcctggtcggcaatggcttccttgaccaggtcgccgatggacagcagccccaacagcttgccgtcttcgaccacgggcaagtgacgcaggtggctgtcggtcatgatgttcatgcactcatcgacctttttgtgggtgtcgacggtgataaccggggaactcatcacctcatgaaccttggtggtgaccgacgacaggcccttgagcatgattttgcgggcgtaatcacgttcgctgatgatcccgaccaccacgccatcctgaaccaccggcaaggccccgacgtttttctccgacatccggaccagtgcttcaaacacggtgtgatcgtgtttgatgacatggacttcctggtttttctggtccttggctttgagcacttctgcaacggttttcatggtggccactccggtattgttgttggttagtcagggtcccactacagaatcctagaccggccaccgcgctgcaaggtccaaagcggcgctaaacccgtcaaaaaacgtcattcaccggtttttttcagtgtttaccccgcatttgtcggttttttggcccgcttggggctggctgccgtcttgcgcggtgcgctcttgcgtttctttttccatggcgtggcacctcggcctgccgggctggcgggaccggtgatggtcatgcgcatgccattgcagcgggcgacctgcttgctcatccaggccgcctgtttggcgacgaagtcttccaggctcatttcgccgctttgcaccatgtccagggcctgctcccagatggcggtggtgcctgggtcggcgatggcccggggcacggcgtcgatcaggctgaatgccgccggagtggctgatagcgccttgccgttcttcaccaggtaaccacggtccagcagcccctggatgatgccggcgcgggtggcttcggtgccgatgccggtggtgtccttgagtttttgcttgagcagcgggtcttcgaccagcttggcgacgttcttcatcgccttgatcaggtcaccttcggtaaagggtttgggcggttgggtccataggtccttgaggttgaccttgtccacggcatagtcctggccttgcatcaatggcggcagggcttgcggagccggtgcttcacgtcccttggccggcgccagggcttcgggcagggcgcgtttccagcctggttcgatgaccactttgcccactgcacgcaacgcaaaacctgcgcaatcgaaatccgcctgggtgcgatcgtactcatgattgggcaggaactgcgccaggtagcgtgcacgaatcagggtatacaccgcccggtgcttgccggtgagttgtcccacgtccttgccggcgccggtggggatgatgccgtggtgggcgctgaccttggcgtcgttccacgcccgcgagcgtcgctggggatcaatatgcggcatcagttcgttcactgcagtatccgcgcgcgccaacgcagccaggatcttcaatgcgtcgctgtgctggctcatcggcaagtagccgcaatcactgcgcgggtaggtgatggctttgtgggtttcatacagcgactgggcgatatccagggtttcctgggcgccgaggccgagcttcctggaacagatttcctgcagggtgcccaggtcgaagggcaggggcgccacttcgcgcatgcgttcggtgcgcagcttcaccagccgggcgctggcggcgttggtcatggcgtcggccgcgtcccgcgccaactgcgggttgaggcagcgaccctggtcgtcacaggcgtcctcggccgcgcgccattgggcggtgaaagtcatgcgttcgtggtgcaggtcgacgtcgatggcccagtaagccaccggcacaaagtcggcgatgctgcggtcgcggtccaccaccaggcgcagtgtcggcgtttgcacccggcctacgggcagcacgccctggtagccggactggcgcccgagcaaggtaaacaggcggctcatgttcatgccgatcagccagtcagcacgggagcgacccagggccgagtgatacaggctgaaggtctccgcgcccggtttgagcgccccgagggccttgcggatcgaggcatcatccagcgccgacagccacagccgctggatcggcccacggtagcggcaatgctccaccagttcgcgcgcgatcatttcgccttcgcggtcggcgtcggtggcgatcaccagcgcctgggcttcccccagcaggcgcttgaccgccttgaactggctggcggtcttgggtttgacgcgcatcttccatttttcagggacgatgggcaggtcggccagtacccagcgcttgtacttttcgtcgtaggcatccggcggggcggtttccagcaggtggccgatgcaccaggtgaccgtgaccccattgcccagccagcacccgtcgccacggcggctggcgccgagcacggccgcgatgtccttggcctgggagggtttttcacagaggtacagccgcatggtcgtcacatcagatcgggttgatgctgtgcaggatgctcagtcagcgcgcattgatcaaccattatctgtatggatgtacagcaatttatgtaggcacctgaaggcacatgtgggagggggcttgccccctcccacagcggatcttctgtgctcaggagatcggattagttgttatcgatatccacgtgacgggtctctttaaggcacaccatccccacgatcaaactaaccccggtcaccaccaccgggtaccacaggccgtagaagatatcgccggtgtacaccaccaaggcaaacgatacggtcggcaggaacccgccaaaccagccattgccgatgtggtagggcagggacatcgaggtgtagcggatgcgcgtcggaaacagttccaccatcaacgccgccagcgggccgtagcacatcgcggcgatcaggatcagcgccacgatcagcaccaccaccatggtcttgttgacctgggccacatccgccgaagacgggtagccagccagggtcaccgcgccacgcagggctttttcgtcaaaaccgtcgatacgcacttcgcccacgctcacctgcaccgggctgccggcgggtgcggcggcgctgctgtagggcaggccttgcttgaccaggaaggtcttgaccttgtcgcacgggctgtcaaatttcgccttgcccaccgggtcgaactggaaggtgcaggtggccgggtcggccatcacggtgatcggcgcctggttgctcgccttgtccatcgctgggttggtgtagtgcgccaggctcttgaagatcgggaagtacagcacggtggccagcagcaggccgagcatcagcaccggcttgcgcccgaccttgtccgacagccagccgaagaagatgaagaatggtgcgccgatcaccacgctgatgatcaacagcatgttggccagggccgggtccattttcaggaattgcgtgaggaagaacagcacatagaactgcgctgcgtagaaggtcactgcttgcccgccgttgatgctgaacaaggcgatcagcaccaccttgaggttttcccatttgccgaaggactcgcggatcggcgatttgctggccttgccttcctctttcatcttcaggaacgcgggcgactcgtgcaggctcatgcggatccaggtggaaatgcccagcagcacgatggaaaacaggaacggaatgcgccagccccacacttcgaactggtcaccggtgaagtagcggcaggccagcaccaccagcagcgacagcagcaggccgatggtcgcggtggattgaatccaactggtgtggaagccgcgtttgccggccggtgcgtgctcggccacgtaggtcgccgcgccgccgtattcgccgcccagcgccaggccttgcagcatgcgcagcacgatcaggatgatcggtgccgcaatgccgatgctggcgtaggtcggcagcaagccgacacagaaggtcgccacgcccatcagaatgatggtcaccaaaaaggtgtacttgcgcccgatcatgtcgcccaaccggccaaataccagcgcaccgaaggggcgcaccacaaagccggcggcaaaggccatcaaggcgaagatgaacgccgtggtgtcgttgaccccggcgaagaactgcttgctgatcaccgccgccagggcgccgtagaggaaaaagtcataccactcgaacaccgtccccagggacgaggcgaagatgaccttctttgagtcgttgctggtgctcgcgtcgatcgacgagcccaggggttgagcatgttctgacatcgggtagccctcacagtgattatttattgttgttccactgtcggcgccaggttcggcgccgctattcagattgcatgaaccagttctttctccggggcgagactccttgtattcggcgaaaggatcagctgcgcggccttctccgcgatcatcagcgtaggtgaacaggtattgccggacgtaatgcgcggcatgatcgacgcatcggcgatgcgtaaaccgggcacgccgtgcacccgcagttgggcgtcgaccacagcgtctttatcgctgcccatgcggcaggtgccgaccgggtggaagatcgtcgttccgatgcgtgcggcggcttcgtgcaattgcgcttcggtttgcagcgcatcacccggcaggtattccaccggcttgaactggctcagggccggtgcggcgacgatgcggcgcgtcaagcggatggcatcggcggccacgcgcaggtcttccggatggctgaggtagttggggcggatcagcggtgcgtccgccgggttggccgagcggatgtcgatacggccccggctctgcggacgcaagtcgcagaccgaagcggtaaacgccgggaatgggtgcagaggttcgccaaatcgctcaagcgacaacggctgcacgtggtactccaggttggccgaggtctgttccgggccggagcgggcaaacgcacccagttggctgggcgccatcgacaacgggccgctgcggtcgtacaggtagcgcaggcccatgcccatcttgccccacagggtgccggcgatctgattgagggtacgggcgttttccagtttgtagatcagccgcagttgcaggtggtcctggaggttgccgccgacgccgggcagctcgtgcaatacattgatgcccaacggtttgagcacattcgaagggccaattcccgagcgttgcaggatgcccggcgaacccactgcgccggcgcacagtacaatctcctggcgcgctttccagctcacttgctggccctgctgacgcccgaccacttgggaggcacggccgttttccagcagtacgcggtccacctccacttcggtcagcacggtgaggttggggcgctggcgcaccggcttgagaaacgccttggccgcgttccagcgcaccccggctttctggttgacctgaaagtagccgcagccttcgttatcgccctggttgaaatctttgatgttggcgatgccgctctgcgccgccgcatcgcggaacgcatcgaggatcggccagtgcaggcgctgctgctcgacccgccattcaccgccgtcgctgtgaaactccgagccgccggcaaagtggttttcgctctgcttgaacagcggcaacacgtccttccacgcccaaccttcattccccgcagcggcccagccgtcgtaatcctgggcctggccacgcatgtagatcatgccgttgatggacgagcagccgcccagcaccttgccccgtggataactcagtgcacggccttgcaggccttcctgggcttcggtcttgaagcaccagtcggtgcgtgggttgccgatgcagaacaggtagccgacggggatgtggatccaggggtagttgtcgcggccaccggcttcgagcagcagcacgcgatgtgcggggttggcggacagtcgattggccagcaggcagcccgcggggccggcgcctacgacgatgtaatcgtattcagcagttgcaatgggcatctgaaggtctcgcttgtttttcttattggccccatcctagttgttagttttcgtcttaaaaatgttagtttttgcccagctgctgtgcgtttttaaacagtgcagcccagggataggcaatggaggcgtcatgttcgactggaatgacctgcggtactttctcgagttgcagcgcagcggtcgcttgctcaccgccgcgcaacgcctgaaaaccacccacgccactgtggcccggcatatcgaggcgatcgagaaaagtctcggcaccgcgctattcgtgcagcatgcccagggctacgaactgacccccgccggcgaggccctgctaaaacatgccgaggccatggaaaacgtcgcactgctggccgaagacgagctgactcatgctgccgcgcccctgggcaagatccgcctgggtgtggccgaaggcctgggcgtgatgttcctggccagccgcatgggcgggctgttcgagcgctaccccgggttggaagtggagctggtggcggtgccgcgctttgtcagcatcctcaaccgcgaagcggaaatcagcattcacctcgagcggccgagcgtcgatcaactggtcacgcgcaaacttaccgactaccggctggccctctatgccagtcgcgcctacctggcgcgcaacccgccgattgaaaagcgcgaagaccttgcagcacacgcctggatcgattatgtcgacgacctgctgttcagccaggaactcaaattcctcagcagcttctgccgcaaccccaaggtggtgttccacagcaccagcgtgatcgcccagcatcaggcggcgcgctccggtttggggattgcggtattaccgtgcttcatggccgccggcgacccggacctggtgccgttgctgccgggggaggggatccagcgcagctactggatcagctcgcgccgggaattgcacaagtcagtgcggctgcgggtgttgtgggattacgtggtggagttgtgcgcgcgtgagcaaggcttgttgctgggcgaagccaactgaagaaaccggatcgataccgtggagtcattgaaccccgtcaggcacgcaactcaaactcggcactgcccagcctttccccattcacccacacatgcaccacatgccgcccagggtaatgcttgcgggttgtcatgtcgcgaatgtgctgttcgcgccgaatgtgctgctgttccccggcacccaggctgaacgccttgagtttgaataccttgtttgcactgtggccggcgcttttcacatagtcgatggcgtagtccaccaccagcttctgtggggctgtggcggtggattccagggtgaaggacagattgatccgctctcccaggttgatcaccgccggcgtcacttgcagatggtggatcttcacgtcggccctggccccggcccccatgatcgtcagcgcacgcgtgttgccttgcttgatcaggctgcgcagcgcgtggcgggcgatccaggcggtgtgagggttatccagattccaaccttcgatcaggctgagcacccactccgggtggtccttggtgatgtcgttgaggtggttggccactgatttgcgcacgtacaggctgctgtcggccttgaggttgtcgaggatcgacgcacacagttcggggttggcctgtacttcggccaggcggaacgaccagggcaagcgcggccgcgaaccttcgctggccaggcggcgcacgtgttcgttggtatccagcgaccattcgtgcatcaccgccaacgtgcgcgggaagtcgtgcagtagaaaatggcggatcgcgaattcggcggagccaaacgtcgtgaagtacttgagcgcggccattgaacgcttgaaatcatcccgaccgtaactcgccacgaagtgcggcaggaacaggctgacaaacgcgctgttcaagcgcggggccaacgcataaagcaccttgagggtttgcgggtagtccagtgggatcaccgcatgcaggctctcgctgacccgtgccatgcgctgcatcaccgacagctcggccagcccggccttggcgtgcttgagaaagcccttggcgtcgaacgccgggtacaccgccgtcatctcgctggcgatgtgttgcaggcgttcgacgttgaagatttccttgagggccggggcgctttggtcggtcatcggtgattccgtaggtgatgtcagagaaaccagcgatattcccgcgcatggatctcttgctggaaggccaggtggtcctggcgtttgttttcgcagtacacgtcgacaaattcggcgcccagcttatcgcgcaatactgcttgatgctgcatggcacgcacggcgtcgagcatttccagggggaagtcgctgccgctgctgcggtcttcattcagcggggcgatgggttcgcgcctggcttcaagaccgtgttccaggccgaccaggatcgccgccagcaccaggtacgggttggcgtcggcactggccaggcgatgttcgatacgcaggttgcgcgggtcggattcggggatgcgcacgcacgcgtcgcggtcttcaaagccccagctggcgcgggtggcggcgttgaccgtaccgcccaggcggcggaaggcattgtggttgggtgagaagatcggcatgcagtgcggcagcaattccaggcagccggccacggcatgacgcagtggttgctgctggtgtgccgccagcaaattgttacccgcgccatcatagaggctgacatgcacgtgcatgccactgccggggaattgcaggtagggcttggccatgaagctggcgcggtagccgtgtttcaatgccacgccacgggtactgcggcagaacagggcggcccagtcggcagcgcgcatcccatcgtcgaggtggccgaagttgatttcgaactggccggggccgatctcggcggtgatcacggtgatatcgatgccctggtccttggcggtttgcgccatgtcatccagtacttcgctgaagcgcgacagccgttcgatatgcaggttgggctggtcgtcggcatcatcgctcagcgggtcgcgggcaaattgcggcaggccgttgtcgagtttcttgtcgaacaggtagaactccagttcaaacgccaccaccgggtgaatgcccttgtgttgcaggcgttccagcaccttggccagcacttcgcgcggttcgaactcgatgggcgcctcggtgccgtccgaggtgatcagcatctggcccagcggctgcgactcccagctcaccggcttgagcgtgcccggcaccaggcggcggttggcatccgggtcgccgtcgttgaagcagtagtcgccaattttgaacaacccgccctgaacccccagcaacaccgcgttctgcggcagcttcaacgggctgccggcggcgactttttccagcatctcgatggggtagcgcttgccgtagaagtgcccgggaatgtccagggcgatcaggtcgacataacgcacgtccgggtgattctggcgaaaggtccgtacttcggccagtaacgtggaggcatggcttttcacgggtgttgctcctagttgtaaacccacaacacgcgggcgggcaggtcggtcaggttggcgtagcggcagtgggcgaaactggccaggtggaagctgtcgccggggccgagggtgactgagccgtcttcaccctccacccataacgtcaactcgccctccagcacaaaaccggcttgttcggcgcggtcgctcatggtctgttcaccgctgttggcaccgggggccagcaggctgtcgagcatcgagaaggcgccgttcatgctcggcgaaacgaggatgtcggtgatgccgttggcgtaatacaccgtgcgccgctcgttggggcgggtgatccagtccacggccttgggtttgggctggctgtagaagtaggtggtgggcacgtcgagggcgtggctgatggcggtcaagtcggccacggtcgggcgcgacaggccgcgttcgacctgggacaggaagcccaccgagcgctcgattttctgcgcgagctgggcgagggtgagcttcttgtgcttgcgcaggtcatggatcagcgcggcgagggtggcgagttcttcttggggtgtcatgaaatttatgtcgaataatttcatgaaaaactacaggaattatttcatgcgggcaatcggcaccttcaccgtagcaccggcattggggtccagccctttcaaggttttcaggtagaactggcgacaagtaccctgtggcgagcgggcttgtcccgcgttgggctgcgcagcagccccataaagatcaccgcagcgcatcaggtaacctgcggcgacaggttttggggctgctacgcagcccaacgcggggcaagcgcgctcgccacagttgcagtgttcgccctttatggaagggtatcagccagatagggccggtttttcaggggcggaagataaagggtttcacgccccaggtgcctgtcagttctacgccgccgaccaacagcagcaggttcccctcgtcgcgcgcttgaatcagtgcatcgcgcagggcataccgttgtccttccaggttggccggtgtgggtgcttgagggttgtactgtttggcggacagcttcggggagtgggtcttgcgcaatgtcagccaataccaggtcggtcggtctgggcgccgaaagatcaactcggtgctgtaccgcgagtcgaagacttcgtagtggctgtctgtcagcagttcgcgcatcagcgttttgatgttgatttgggtaggccgctccaacaggtttgaaaccaggacgggacgtaccccagccgtatcgaaccgtatgaggttgaactcatttgaaacccccaatgaccactcgaatggccctggccctctcggcaaggtgggcagcagtgccaacggatcgttcgcgatcagagtgtgccgctgggtcagtgtgccgacagcgcccctggtccattcggtccagtcctgcagggtgttgagcacatgcgcatagccttttgcggtcagcccggatgggttcgctgtgttgaacaggcttgcgccaacctgggcgcgggcgcgtgggtcgaagtggggaaacatgcggttcatgtgcgtggcaatcgatgagggaagcggcggctgcgggtggatgagccaggtgtccaagtgagcgttgtattccacgagcctgggttgttcaaacggcgcgttcgcgaccacgtgctcgaattgcgcgaatgtcgagtgaggctggtccgccgacacgatggcggttctcgcgccttgtgtggcgaatacgctatcgcctggcaggatcgcgtagtaacgcccgttgatcttgatgtagtcctgtagcgcctggctcggcgttgcctggcttcggcgccacacgcccgggcgccccggcacaggggtcatcgtctgtggcgcaaaggcctgcccccaatccacaaaacgctcggcgtcgctgcgcacagggcgctgaggcggcagggctggcctgcttggcccgggggcggggccgatggcggtgacggtttgggtgcccggcaggtcggtaccatgcaacctggaccagaagcggttctcggtggtttgcaggtacgcaaagcttagatcgagttggcttggcgcctggctcaggcggaacaccagggacatctggtgttcaaggttattgaacgcggggaaattgaaggattcaaacacccttcgagcctgttgcaggtccaggtgcggtaaaagatccatcaacgccctttccggcacggtagggggtgagccaccgaacagcccgatgagtggcgagcggatctcccaggctccttgaaccgtgcggtagagcggctcgcccgggtacgcactgggtgcgcgccgtgggtccttgagtcgccagacctgacgatcgtgatccctgcggatcgaataccagcggccactctcctgcaggaaatgccgaggcgcctcgaaggccccgggcgtcgccgtatcctgtacgtagatttgctggtcttcccatcctgccagcggcttgacgcccgtgggcttgctgcgcaacgccagcttcgggttaagtttggggccggttgcgatacctctactcgccgaacgcgcgccgccgatggcgccgtcgatcaccgcgcccaccatttcacccagggcccgcacaatgtattgggcggcggcggtgcggtcgccgagttgggcggcttccacggcattgatgatggacaggatgcttctggacaggccgatcggcagcatgaccttgaccggcaggaacaacgtggcgaagtccagtgccgcggtgacgagggtggcggcgctttcgaggttggcttcctgggtgctggtcgattgcgcattggcatcgttgatcacggcagacgcttcggcctggtaagcctcttccaggaagtgatcggcgatacggctcaaggcgatgaccgtttcattcgccccacctttgagcaggttgtggatgcgcgggcgggcactgagttgcacgcgggcagtcaggtagtcacgccaggcgctgtggttgatgaagtcgcggtgcatggccgacgcgtcggcgtattcgtggaacagccgaccgttggcggtgccgggggtatacaccaccagggaggcgacgctgtgggacgcggttgaaaacaccagcaccccgcgcacgcgttcaccgcgcagtttcaggctgctgacgatgatgcggtgctcttcgacggtggggcgtttatcgtcatccgtggggccggcgagggcactcattacccagttgtacccgcggtcgagccggtccggcaggaagtcgccggcgattttggcctcgatggcgtccacccgcagttgcaaggccatgagttgggcgtagcgatcctggtcggcgtgcgcctcgctggagctgaccaggcgcgacttgaggaattgctcgtagctgtcaccgatattgaccttgcgtaccagctccttgacttgcgccaccgtcagcgcggtatagggcgcctggtctttatcggtcagccaggcgaagtttgtgaagttgagatccagccactcaacgttttccagcgccaatgcggtcagggtcagcgtgcgtgtggtgtagaccggcgtgcctgtcgccggcggttgcggcttgccgccgaccacatagctgccggtggggcgggcggcgtaggttttggtgtggatgaggagggtgtccgggtcggtcaccacgccgtagtcggcctccagctgcctgcgcaactgctcattgctgtaggacagtacggcggcggggtcgctgaattgggacagggagggcagcccctcgggcatggacagccgctgcagctcatcggcgtattcctgtactgcgcttgtccagcgttgttgatcgccggggctcgcttgcttgagaaactgctggagctggcgccgcagtttcttctggtggcgggcgaccaggacgccactggcatcataggcacggctcagatcggtgacccggtcgaggcttgccggcaattgtcgtggggccaggccgtggggctgacgctggtagtgcgcaatcatccaggtgaagtctgcctgtgcccgctcatgcaaggcgtgcaggctatcgctgaacaccgactccagtcgttcgaggtagcgaaactggtcgccttgggggtgttgctggtgaaacgccaggccgctggcacgatcgttgtggctcatcagggccaggatgtcgccgaattcgatggcgctgttgagtcggcgatgcaattcacggtcaaggccggccagtgaatcgaaggcttcgaagccgctggtcgggaggtacaacagcacattgccgacgttggcctggggggcgatgtcacgcacttggagtggtttctcctcaccttcgaagcgcacctgggcgtcgtccgggtccctggccgtcagcacgaatgccccgtacagcgggatatcccgcgacagtttgtctttgaccgccacgcccaaggcgcagggtcggtagccgttcaaggcgcgtcgggaggccgcatccgggtagcgcatgacacgcaggagcagcagctcgctcgacacatcgagcaggctgtcgatcttcagcagttcggcttcggctctcatcagatccaggcgcttctcggccagccactgtttgctggtgcgggtatcgttggtgtcgatgggcgtcccccagaactgttcgacctgggtgttgaagcgcgccaccagggtgcttgccagcgtatcgagaaaaccgtcgaaggcctgcggggtgagtgccagtgccgagccgtagtcccgaccgtcgcaggtcaggtgaaagcgggtagcgtgcttggcgtagtgggcggagtgctgcgtgaccaatcgttccactgcggcctccatgagtgtcggcagcaacggattcaacgcttgagccggctcggtaggggacgcgtctgccgggttgatcttgaggtaggtcctggtcaggtcgaggggcgtggtcagcgtgttgaacgcctggttgaacgcatcctgcacacagctgaaaaacgtgggttgcccctgcaacagctgcctgatttcgctgttcagggtctggatcctctggaccaggcggctttcgcggcggttgtcgcgcgcgttcaacgtggtgatcatcggggtcgatagagcgttgccgtatcgcatgtcatttacctgcaaaataaggtgaatggccatggtgctgcgggtgcgggctgcgtgtgcgctatcccgttaatacgttgaagggtggcgtgtgcggtgtttgtgattgcggctgaatgtttgcgtgccgcagcggtccgaacctgggtacgcatcattcattgaggaacacccatgacatcaaaatccctgttcgcctccctgctggtcgccgcgagcctgtccaccgccagctttatcgtgcacgccggtgatacgccccaggagacggtaaagccttccagcatcaacacccgtgacctgaaggaaggtgaccgcgccccggatatcctgatgcgcaaggagtcggccgtcagcgactggaaaaagcgcggtctcaaacagcctgaagaagacagccaatgggcacgggtgggcgaccgtttcgtgctgctcaagaccactaacggcaccattctcgagatcacccccgtcaagaaatgaccttgcatttaggccctgctcctgagttaaggtagccggctataaaggccgcgttaccttcaaggaaagagagcaggatgcttgccacaataagaaactatccccgcaccgttaacctgttgctgtcctcgacgttgctgctcacgctggccaaggccatcacctttccgtacctggtgatttacctcacccgccacttcgccctcgacattacccaggtcggcctggtgatcggcagttcgttgatcgttggctcgctgctcagcgtgtatggcgggtttctggttgatcgtatccacagctaccggctgttgctggcccttaccttgctgttcctgctgggctttgtcggcatggtgctcgcggggagtatctggaccttctacacctgcctgatcctgatcaacctggctcatgccgtgatcgatatcgcggccaaagccggctttgccagcctgttgcccgaggacgcgcgcagcgaagtgttttccatcaagtacaccctgaccaatatcggttatgccgtcggcccggcgtttggcgcggtggtggccaaggtggaaatcagcttgccatttgtgctgtcggcgctgttggggctggggtttttcctgctgtattggcgttggggtgatcgtacgctggcgaccgtcgacaccacgcaaaagccagtgccgttcctcgccgttggccgggtgctgttgaaggatcgtcgccttgtctgcttcaccctcggcggtgtactgagtgccgtggtattcggtcagttcaccgcgtggctgtcgcaatacctggtgaccaccaccacggccgactacacctacaccgtggtcagcgccgtgctggtcaccaacgcggtgttggtgatcgccttgcagtacgtgatcggccggcgcatttcgcaccgctacctgggccaatggttgatcgccggcctgggcatgttcatgttggggctcatcggtttcgcgctgtccaccagcgtgctgtggtgggtgctggcaatggcggtgttcaccgtgggggagatcattgtgttcccggccgaatacatgtttatcgaccggatcgccccggaccacttgcgcggcatgtattacggggcgcagaacctgtccaacctgggcgcggcgctgggcccggtgctgtgcgggctggtgctggccagcctgccggcccattacatgttctggatgctgggcgcgtttatcgttgggggcggggtgttctacttcattggggcgtcgttgaaggcaagtcatccagcgtgagctggcccatggtgttgctttgcaattcgtagcgcagctcatccaccatcttttccacttcttgcggggtctgcaggcggttggtgctgatcccggtgacgaccaggtcgacccggccggtttcggcgtcgtagaccttgagggtcagggacgcatcccggcacagggtgaactcgcaggtcagcggcgacagaccttcttcgatgcagtttcgcagttgggcgagggtaaacatgcaggttccttcaggcatcaggttcgataccgagaaggttattgattagccctcgctgcaataaggcgaattcgcactaggtgtactagtgcatttgcactgtcatggcttgtttttgacccgcaattccccggcaaacagcccgcgttcacgggcccagacgatcgccgcgctgcggctgtgcacccccagtttggaatacaccgtggccacatggttacgcacggtgttgggcgccagtttcaggcgcgaggcgatctccttgtcggccagcccctcgcagatcaggcccagcacatcgcgctcgcgggcggtgaggtcggtgaaggccacgttcgactggctggcgctgttgacgctcttggcgttggccagtttttcgatgagggtctggctgaaccacgaggcgtcctgcatcacttcctcgatggccgccaccagttccagctccgagcgtttgcgttcggtgatgttcatcatcaccagcaggtagcagggcacgtcctggatgatgaccgtgtcggcggagaccacgcagtcgatcacctcgttgcctttcttgcgtaccttgaggtcctggccgtcgaggttgccggctttttccaggcgggcgaacagctgcgcgccagcctgagggctgtcgataaagtcgatgtcctcgatcgacttgccgatcaactcttcactggtataaccggtgatgctcatgaaggcttcgttgacgtccaccacctggtggttgctggcgttgcacaccagggtcggcaccggggtcaggcggaaggatttggcgaaacgttcctcactctggcgcagggcgatttccgctttgcgccgtggctccaggtccatgaaggaaaacagcatgcagtcctcttcgttcatgtccaatggctggccggcgacgatcaccagcttgctgccgccttcgggcagccgcagttcggcctgcatctgcgggacggtcgcgccttcgcccaggcgctggatggccaggtccttgcgttcggcctgttccagcacatccagttcatacacggatttgccgatgatctggtcgcggttgtagccggtcatctccaggaaaccctggttgaccttgatataacgcaagtcgctcaggcgacagatcacagccggcgccgggttggcgttgaaggttttttcgaagcgctgttcggcgctggcccactcggtggcgtcgctgaggatcagtaccagcaattccgcttcaccgcgggagtcagtgatcaccaggctgcgcaagcggtgcacccaggtcttttcctcatcggcaatgggggtgacttccaccaccacatcgctgaactcatcgcccgcggcggccctggccagcgggtagttgtccgcctgcaccgggtggttgttgcgatagcgcaggacaaagcgctcggcatattgctgcccgttggcccccagccccatcacgtcatgcacgccgtgcatggtcagtgcggcctcattggcccacaggatggtttgatcgacctcggccaggatcacgccgtcggatagcccggagatgatctgctgcaattggcggcggttggtttccttggcaagcacatcctgggtcatgggttctcctgggggtcggcatatgggagtacgacacctggggctcaggatagtgcggatgcattactggggcactggcattgaaccggctgggatgagccaccactcggcatcccgcgcagggggcgcgtagaatgccggccttttacgcatatctcgcaaaggtgccccttgagcgcaggcaaagccgtcggactgttgttactcacctccctgttggcggcgtgcggcacctcgccgccacgcacgccgaatgacctgtgcggcatcttccgcgaaaaggacgactggtacgacgccgccaaagtcacgcaaaaacgctggggcgtgccgatccaggtgccgttcgccatcatgtatcaggagtccggcttccaccaggacgccctggccccgcgcaaatacctgctgtggatcatcccctggggccgcgtctccaccgccgccggctacgcccaggccaaggacgaagtgtggaacgactaccgcaagagcaccggccgcagcggcgccagtcgccaggacttcgacgatgccatcgactttgtcggctggtacatggacaagacctacaccgtcaacggcgtgtacaaatacgacgcctacggccagtacctgaactaccacgaaggctggggcggctatcgtcagcgcacctacgccgccaaggcctggctgccgccggtggccagcaaggtacaggcgcggtcgcagctgtatgcggcgcaatatgcgcggtgcaaggatgatttggggcgggggttttggagtcggttctggcggtggctataaggaccacagtggtagtgttgggtgtgtctccttctctcagcgtgggagtgccgggtgctgggtgtagccaagcatctgatcatagatatcagcgcgccgatccctttgcaggtcattgagattgttccagatcggtgcgctgcgcgcgctgctgaggtcgatatcggcaaacagaatctcctggcggttcgccgacgccaccttgccgatgggccaaccattggtcccggcaatcaatgagcacccgagataacgggcatcacgctcttcaccaattcgactggctgctgcgataaacacgttattgacgtgcgctgcggtcatcgtcaggtaagacgccatgcacttgccggcctcatcaaataacgggggaggggtccatacccagttgttcaggctacaaatgatatcggcgccttgctggctgagaatgcgcggtacctcgggaaaccagatgtcccagcagatcagcatgccgatacgtccaatgggagtatcaaagacagggaaacctgtgttcccaggggtgaaccatagtttttccaagttccagaggtgcgctttgcggtacttgccgataaagccgtccgggcctatcaggacgctggtgttgaacaattgcatgccgtctagttcgctaacgcccgcagccagatacacacgatgccgggaagcaaattcgatccatacctgcacgcttcttccgttcggaacaatttcggcatggtcaaaggcatcttggcgattggcgaagaagtaaccgcagtttgaaagttctggaagcacgatcagtgtggcgccgccgttggccgcttcagttgcgagcgcaaggctgtgctgcaggttagcggtgcggtgctgcgttcctacctggggatcaaactgcacgacagaaacgcggacagggctgatagctgggttcattgcaggggactcttatgggggactgctctacataagaggtgatagggcggcaaggtgtaaatcaggtgcttccgtttaggttgtcagttggcgcctgccaatctgaagcgcttagttacggcaagaagcaaggcttcttgccgtaactcattcagctcggctgcatacactccagcgaccgatccaccatcacactggccatgtccaccagatgcatgaccgacagcaccaacgtgcgtgaagtcccttccagttgatccccggccgtttgcgccgcaacggcggcacaacgcaacacgctactggcgtgggccagggcgtcttcgaagctgaggtctggggtggtggtgaagaattgcagttctgaagcgggtggcgcggggacaggtttgtccatgggttcaactcctaatctaagttggaatgtcaccaccatcgctaccaaacgactttaagggtggtgaccgtacgcagattggtagaccggtgattaggacccggtgcacccgaaggtgccctgcgcacggccaccataacgcagggccgaaaaaaagcgccttgcataagggggcgcttagcgcctaatcactcgtggtctaccaaaccccgagtcactgaattggcagtgaccgacgaagactagccacgtgatttgagcggcgcaagcggttgggattctctcggaaacgtcctgcgagttaaagggaaatgtcactgatttgaggtgtttcatctctccaatattccttgtggcgccataagatcaaggcacaaaaactgacattagttctctggcgcaaaggtttcgcacatcgtcatcatcacggcacgcaagcttgcttgaggggcggcgggcttttttcattggtgtgtcatgtgtgtacaaaaaacgcattgccatttagcggtgtgtaatatacacacctaagggtgggcgatgagaagtcgagaggtgattgacctgttggttgcagatggttgggttgaggtggcggtgaaggggagtcatcaccagttcaaacaccctgtgaagcgggggagagtaaccgtccctcatcccaaggcggagattgccaagggcactctacacagtattttcaagtcagcagggctcaagcaatgactctgctggagcgttggacgagcgccgaagggctcgtccagaggaggatcaatgaaattcccagtggtagtgcataaagacgctgactcggattacagcgtgaccgttcctgatgtgccggggtgtttctcggcgggtggatctttctccgaagcattggataatgttcgtgaagcattggctttgcaccttgaaggcctggttgccgatcaagaacagcttcctcaggcgcaggaggttgatgctcatataggtaatccggatttcgcaggtggtgtctgggcgatcattgactttgatctaacgccctatctgggcaagtcagtgcggtttaatgcctctttgccggaacatctgttgcaacgcattgatgagcgtgtgcagaaggaccatcgctatgcatcgcggtcagggttcctggcgactgctgcattgcgcgagctttcagcgtaaaccaactcaagcaaacactatctatccaacggattccccatgagccccgaagaactccaaatcaccgacatccgccccggcaccggcaaagccgttgtcaagggcgcgctgatcaccacccaatacacaggcaccctggaggacggcacggtgttcgattcgtcctgggagcgcggcaagccgttccagtgtgtgatcggcaccggacgggtgatcaagggctgggacttgggcttgatgggcatgcaggtcggcggtgtgcggaccttgtacgtgccggcgcatctagcctatggcgagcggtcgatgggcgcgcatatcaagcccaacagtaacctgcgttttgagattgagttgctggaagtactgacgcgggatgattgagacctccaagacaaacgcttcctgaaccctccctgaagaatcctcttattcaccatacggaaactttcctacggtttactctcccatcatcggggcgtaagcttcgcgcgttttcatcaatagcggagaccctcagtgggtacttgttcgagtgacagtagtcggccggtttcggtaaccggcacaggcttggcaaggtaacgcgcatttttccgatgccgttgtctcgccactaaaagcgagaagcggcatcccggcagcggccagtcctggctcctgcccgaatccctctcatcgacgctgaccagcgcccggcttacctcgggatgctacggacgcgcctgccctttgcggcaggcgggccagggtggctgtgcctgtaaaaagggtgcggcgcacacggcggtacctgcacgacggttttttcctcgcgcaggagtaacaccatgaacctcactctgctcaaagagttcttcgccggcttcctgcggacccggcacatcgcccggcatttccgccgcctggcgatgctcgaaaccgtgaccgacgccagcgtcagccgcgaagtgccgccgaccctggcgcaaaccctggtggtctcggccaacagcagtgccgtgcaattgctcggcaccctgggcagccacgccgaggggttgaacactcaggaggccgacgccctgcgcgtgcaatacggcctcaacgaagtcgagcatgagcagccgctgccttggtgggtgcacctgtggcactgctacaaaaacccgttcaacctgctgctgaccctgctggcggtgatctcctggctgaccgaagacatgaaggccgccaccgtgattttctccatggtggtgctgtcgacgctgctgcgcttctggcaggaagccaagtccaacaaggctgccgatgcgctcaaggcgatggtgagcaacaccgccacggtgctgcgccgtgatgaagccaagcgcattgaactgccgatcaagcaattggtgccgggcgacctgattgtgctgtccgccggtgacatgatccccgccgattgccgtgtgctcagtgccaaggacctgttcgtcagccaggcggcgatgaccggcgaatcgatgccggtggaaaagtttgcccaccagcacgacgcccacacccgcaacccgctggacctggaaaacatcctgttcatgggcaccaacgtggtgtccggcgcggcgacggcagtgatcctgaccactggcaacagcacctatttcggcgcgctggcccagcgtgtgaccgccaccgaccgtgcaaccacttcgttccagcacggcgtcaacaaggtcagctggttgctcatccgcttcatgttcgtgatggcgccgctggtactgttcatcaacggcttcaccaagggtgactggaccgaagcgctgctgttcgcgctgtcgattgccgtgggcctgaccccggaaatgctgccgatgatcgtgacctccaccctggccaaaggcgcggtgttcctgtcgcgaaaaaaagtcatcgtcaagcgcctggacgcgatccagaacttcggcgccatggacgtgctgtgcaccgacaagaccggcaccctgacccaggacaagatcttcctggcacgccacgtggatgtgtggggcgaagagtccgatgacgtgctggaaatggcctacctcaacagctactaccagaccggcctgaaaaacctgctggatgtggcggtgctggagcacgtggaggtgcatcgcgagctgaaagtcggcactgcattccagaaaattgatgagatcccgttcgacttcaaccgtcgccgcatgtcggtggtggtcgccgaacagggccaaccgcacctgctgatctgcaagggcgccgtggaagaaattctctcggtgtgcaacaacgtgcgccatggcgagaccaacgaggcgctgaccgaggaactgctgacacgcatccggcaggtgaccgctgcgttcaacgaagaaggcctgcgcgtagtcgccgtggccgcacagccgatggcaccggggcgcgacacctacagcctggcggatgaaaagaacctcaccctgatcggctacgttgccttcctcgacccaccgaaggaaagcaccgcgcccgcgctcaaggcgctcaaggcccacggcgttgccgtgaaggtgctgacgggtgacaacgaattggtcaccgccaagatctgccgcgaagtgggcctggagcaacaaggcctgctgatgggcaacgacatcgaggacatgactgacgccgaactggccaaggccgtggaaaccaccaatgtgttcgccaagctgacgccaagccacaaggagcgcatcgtgcgcctgctcaaggccaacgggcatgtggtgggcttcatgggtgatggaatcaacgatgcgccggcactgcgtaccgccgatatcggtatttccgtggacagtgcggtggacatcgccaaggaagcggccgatatcattttgttggaaaagagcctgatgatcctggaggagggcgtgctggaaggccggcgcaccttcgccaacatgctcaagtacatcaagatgaccgccagttccaacttcggcaatgtgttttcggtgctggtggccagtgcgttcatcccgttcctgccgatgctgccgatgcacctgctggtgcagaacctgctgtatgacatttcgcagattgcgatcccgttcgataacgtcgatgacgagatgctgagcaaaccacaacgctggcaaccgggagatgtcggccgtttcatgctgtttttcgggccgatcagctcgatctttgacatcaccacgttcgcactcatgtggtatgtcttcgatgccaacacccccgaccaccagaccctgttccagtccggctggttcgtggtggggctgctgacccagacgctgatcgtgcacatgatccgcaccccgaagatcccgttcctgcaaagccgtgcggcgatgccgttgatggtgatgacgggcgtgatcatggcggtggggattttcctgccgatggggccactggcgcactacttcaaactgcaggcgctgccgtcgctgtatttcgtgttcctgccggtgatcctgctggcgtacatggcgctgactcaggcggtgaaggggtactacatccgtaagtttggctggcaatgaacagggaagatttcctatgcaagcaatcaacaacatcaacctcgaatccctggtcgacaccctggtcagcctcaccgcagccttcatcctgggtggcctgatcggttttgagcgtcagtaccgccagcgcacggcaggcctacgcactaacgtgctggtggcggtgggcgcggcgattttcgtcgacatggccagccgcctggggggcgcggaaggcgcggtgcgggtagtggcctatgtggtgtcgggcatcggctttctcggcgccggcgtgatcatgcgcgaagaaggcaatgtgcgcgggctcaacacggctgccaccctctgggcatcggcggcggtgggtgcttgcgcgggcgccgacctggtcctcgaagcgctgctgggcacgctgttcatactggcggccaacaccttgctgcggccgatcgtcaataacatcaaccgtcagccactggacgtggtgtcggcggaagttaccaacatcctgtatgtgattgcccggcgtactcagcagaaggccgtactggccttgctggaagccgagcttgcacgctgtaactatcccgccagcgacgttgacgtgcggccttttggcacggaagaagtggaaatcgaagccaccctggccgtgacctcggtagacggtgatgagctggacgccctggtggcgcgaatttcgatgtcgaccctggtggtgcaggcgttctggagccccagtaccaccgagtagtcccccgctgtcaggcattgccctgcgtaaagctggctatgctgtgacaaggaaaagtcctacaagcattagagactatcccttcatttgagcggacacgccgttgttaaggttgcgcgcttgcgtctgcccaggaagcagtccgcagctctacgtgtttagcgtgttctatcaaaaggaggggtctgtactgcctgaagtgtcatgcagagtaatcagtaccgtttgtcggaactgttacttttcacaggtagataggtcccgtgtgatatgtaagcgtactgatccctcggggagtcttatgagcagcaaagctttgattgtggacgatcacccttttatccgcgccaccgtgaagtacctgttgaagcaggagggcttcgataccatctttgaagcgggcaacggcgccgacgccatgcagattgctcgggaggagcacccggatctggttatcctcgatctggcaatgccaaaacttggcgggctggaggtgatcagccggataaaggcgctgggactgccctgcaagatcctggtactgacctcgtatctggcggtgtttttctccacgcgctgcatgcgcgctggggccatgggtttcgttgccaagaccggtgagctcgatgaactgcaaaaggcaatcagggcaatccgctctggttacagttgcttccccagcctgcccaccagttcagtgcgccgcgacgatttgcagacctccgaacaggagttggtggaggcgctgtccgaccgcgaattgacggtactgcaaaaactggcgctgggcctgagcaacaaggaaatcgccgaggatatgctgttgagccacaagaccatcagcacctataagacccgcctcaaagagaagttgcgcatgtcgtcggtggtgcacctgtccaagtttgcccagcgcaatcatctgatctgatctgaaatgaccacctcccggctggtgagattcacggccatcctgctgatggggctgttgccctgtgcagcgatggccctggatgagccacatgccctgcgactgctcggccattccaccctcgaacacccaacagtagcgctggatgacagcgactggcggtggttgcgcgatcgccgcagtttggtgatgggggtgtcggcacccgactacgcaccgttcgacctgagcaacgacaacgattttgaaggcatcacggctgactacacgtggctgatcagcctgatcttgaatgtacctatcgaggttcggcgctacgacacccgtgatgaagtgatcgaggcgctcaagctgggcgaggtggatctggtagggtcagccaatggttatgaggcggccgacaaggcgttggtactgtcgcgttcctacgccaatgatcaaccggtgctggtgacccgcacgggtgaaagccattccttgagcgtcgacctggccggcaagcgcgtggcgatgctctatcactatatgcaacccgacgctgtgcaggccttttaccccaaggcgcaactgttgttgtacggttcgacccatcaggccatcggtgccgtggccttcggccaggcggacgtctacttgggcgatgccatcagcgctcgctatctgatcaacaagaaccaccttaataacgtgcgcatggcagacttttccgccctcgaggtcaacccgttcgggttcgcgtttacggccgaaaaccagcgcctgttgacgatcgtcaatgccgcgctggctgctatcccggccagccagcagatggaaatcctgcgtcgttggagtgccggcggcagtgggttcctggaggctgaccgattgcgcttgagtgacagcgagcagcgttggctggagaagcatccccgggtgagagtggcagtactggataagttcgtgccgctgtcatttttcaatgaacaagggcagttcgtggggttgagtgacgaggtattgtcgcggatcagcttacgcacgggcttgaagttcgaagtggtgcagggcagttcgctgcctaggcaagtcgacgaggtcagcgccggccagatggacatgttggcggtgatcacgcccagtgtcgagcgttccgaaaaggtgcgctttacccgaccctacctgtccaatccctatgtgctggtggtgcgctccggcgacgagcgtctgctgaccctggaggacatgccaggcaaacgcctggcgttcattggtggcaacagcctcgctgcgcagatcgcccgggactatccagggatcgagtttgtcgacgtcgagaacccggagcaggccatggaatgggtggccaagggcagtgccgacgcgacagtcatttcgttgatcagcgcacgctacatgatcacgcgcaactatcgcgatcggctgcgtatcaccagcactgtgggtacggaaccggcgcggattgccttcggcgtcaaccgcagccagttggagttgtattcgatccttgagaaggcgttgttgagtattacgcctgaagaaatggacgaactgaccaaccattggcgcagtgaaatcattattgaagacagctactgggtcagtcatcgcaacgtgattatccaagggtttggcctggccgcgctgttgttgctggtcaccctgggctgggtgttttacctgcgcaacctgattcacaagcgtgcccaggccgagcgcgccctgagcgaccagatgcgctttatgagcgtgctgatcgacggcacgcctcacccgatttatgtgcgcgatcgccaggggcgtttgatggcgtgcaacaacgcgtacctcgacgtgttcggcttcaagttggaggacgtgatcggcaagactgttgtggagaccgatacgggtaacccgccccaggcccagtcgttccatgccgactatctggacttgatggagcgcggtgagccgcagattcacgaccgggtgctgaaggtgcccggtggcggtgtgctgacgatttaccagtggatgctgccgtaccgtgatagcaacggcaacgtggtaggcatgattgccggctgggtggacgtgagtgagcgccagcgcctgttgggccagttgcaggaggccaaggacgatgcggatgccgccaaccgtgccaagactacgttcctggcgacgatgagtcatgagatccgaacgccgatgaacgcggtgatcggcatgattgaactggcgcagaaaaacgccgaacaggggcatgttgatcgagatgcgctggaagtggcatcgatggcttcgcgcagtttgctggagctgatcggcgatatcctggacattgcgcgaatcgaaaccggccacctgtccctgaccctggagccggccaacctgcacgagctgttggcctctgtggcgcgggtgttcgaagggctggcgcgggataaagggctgtcgctgcacgtagagctcgacccgatcatcgatcgactggtactgatcgatccattgcgcttcaagcaagtggtgtcgaacctgttaggcaatgcgatcaaatttactcactccggccagatacgcctgggtgcccaagccgcatcggtgttggccggtgaacatttgaacctgcggctttgcgtggaagatacggggattggcatcagcgccgaagatcagcagcgtttgttcaacccgttcatccagggcagcaataacgagcagtcggcgcgcagtggttccggcctggggttggtgatcagccgtaacctgtgcgagatgatgggcggccaactgcacctgagcagcgtgctgggcaaggggacgcgggtggatgtgacgctggcactggcgttgaccacggcagcagcggtttcctcatctgtcccctgtgcgcctatcgcgcaggcattgaaacttctggtggtcgatgactatccggccaaccgcttgcttctggctcgacagttgaccttcctggggcatcagatcgttacggccgaagatggcgccgaaggctttgcgttgtggcaggccgggcattttgacggggtgatcaccgacagcaatatgcccgtgatggacggctacacgttggcgcgtgatattcgtgcgcaagaacgtcagcgcggcctggtgccctgccttctgctggggttcaccgccaacgcccagccgaaggaggttgagcgctgccggctggccggcatggacggttgcctgttcaagcccactgggcttgacgatctgcgtgcggccttggcgtcgcgcacggccagcgctgcaagggatgaagccaaagcgcaatttgatttgagctcgctggtgatgctgaccggcgatgacactgccgtgctcaacgagttgctggcacccttgctcacgagtcttgcagaggacctccgagtgctgtcgaccctgcgggacggggccgatttcggcaagctgcatgacctggcccatcgtgtcaaaggcggcgcgcgcatggtcaaggcccaggcgctgatcgcctgctgcgacgctttggaggatgtgtgcgaaaggcgcgatcgcgatgcagtggctgctgcggttgaggcgttggacgcggctatcactggcttgcatcacagcctaggtcagtactgcaagcagccttgaccgaggcaggtatccgttcggcgaatttgggagaactcctacatggaacgggaacaagcctgattttgtcgtcggcatatgtctggagaatgggcctcgctcactgacgagcactgcctgcccaggggttcgccatgccaaacaaagcactgaccatcctgattgccgatgagcaacacctgcaacgcctgtacatcgaaaaaatgctcaaccagttgggttatcaccggatcgtaccggtgcagaccttcgaagaggtccaactgctcaccgcgattccggcacagcctttcgatgtgctgatcatcaacgcggggctggcgatccacacctgcggtcctcaaccccaggtgcatcatgtgctggtctatgaccatctggatctgggcctgtctgccgacgcaacgccggcagtgctggtgcgcctgcccggcgtgccggacaacgtcaacctcgaacacttcatggacatcatcgacccgcctgcggccgccacgggcctgcgcgtactgccgtggctgcgggagttatcccgcacgcctgtggctggggtttagtcccactggggggcgatacccttggggctggtgaggcgatggccgcgttccagcccggccatctgcgccatgtccgcagggctcaaggtcagttgctgggccttgaggttgctttccaggttggcgcgtttggtcgatgacgggatgactgcgtaacccagttgcatcgcccaggccagtgtcacttgcgccggggtcgcctgatggcgctcggcgatttgctggatcaccgggtccttgagcacttcgccgtaggccagggtcatgtaggacgtgatctggataccgttggcggtggcaaaatccacgaccttgcggttttgcaggtaggggtgcaactcgatctggttggtggcgatattctccgcacctaccgccgcaatcgcttgtttcatcaggtcgacggtgaagttggaaatgccgatccggcgggtcaggcccaggcgcttggcctccagcaactggcccatgaattcggcgacaggcacctggtcctccggcgagggccagtggatcagggtgaggtccaggtaatcggttttcagtttgcgcaggctctcgcgcaggctcggaatcaactggccttcggcgaagttggcgatccagatcttgctggtgatgaacagctcatcgcgcggtatgccgctgtcggcaatggcctggccgacatcggcttcgttctcatagatttgcgcagtgtcgatgacgcggtagcccagctcgaggccagtgctgacggaatcgatcaccacctggccttgcagacggaaggtgccgaggccaaaggccggaacgttttgcgtagcgatagacatcagtgactcctgaagagggcttgaacaatggagtcgagtatccgcttgtcgttccttcggaaaaaccgtcgaatgcgaaaaggactctttaccgcagatcacgaatctactggggctggatgggtgtcgccgggttatcgcgactgatgtagagtcgtgctgccaactcaacccaaggaaatcgccgcatgacccaggaatcccgtttctcccggatggacccggaagtgcgcaaggccaatctggtccaggccacgctcacctgtctcaagcgtgatggtttccagggcgcgtcgattcgcaagatcagtgccgaggccggggtgtcggtggggctgatcagccatcactattcgggcaaggacgaactggtggccgaggcctaccgcaccatcaccgaccaggtcatgagcctgttgcgcgcgaccatggccaaggcgccgccgaaccctcgggagcgcctgtcggcgttgttccggggctcgttttctgccgaattgctcgacccgcacctgctggacgcgtggctggtgttctggggagcggtaaagaccgcaccggcgatcaacctggcccacgaacactcctatggcgagtaccgcgccatcatgcgctcggccctgaccgacatggcctgggaggagggctggaagcacttcgacgccgacctcgccgccatcggcctgagcgcattgctcgatgggttgtggctggagtcggggctcaaccccggcacgtttacgcccgaacagggcatccaaatctgcgaagcctgggtggatggcctgcaggctggcggtcgccagcgttatcagctcaaaccctgagcctgctccagccgcctgagcgcaaggttcaggcaggcggttttcccttctgaaaaaatttgcagtttgctgattgccttcttactgaacacttgtttagtatcgcctcatgtcgcacccctcaggccaaataaaacaattcgaggaagccatgaccgccgattcgcccgtgctcactcatgtagcagctggtgttgcctggatcaccctcaaccgtggcccgcagcgcaatgccctggacatccccaccctcaagcacctgcacgccttgctcgatgcgttcaacactgacgccgctgtacgcgtggtggtattgaccggtaatggacgaagcttctgcgccggtgccgacctggccgagtgggcggatgccgaagctcgcggcgccctcgaaacctacggctggaccgaaaccgcccatgcgctgatgacgcgcctgcacaccctcgataaacccacgattgccgcgatcaacggcaccgccgtcggcgcgggcatggacctgaccttatgctgcgacctgcgcatagcggcccaatcggcgcgcttcaaggccggttacaccagcatggcctactcgccggacgcgggcgccagttggcacttgccgcgcctgattggcagcgaacaggccaagcgcctgctgttcctcgacgagctgtggagtgccgagcgcgccttggcaactggcctggtcggcgaagtcgttgccgatgatcagctcaatgcccacaccaccgaactcgccgcacgcctggccaacggcccgacgttcgccttcgcccagaccaagacgctgatccgtgaaggcgccgggcgcagcctgcccgaacagttgcaggccgaacgggcggccggcctgttgtgcgggcgcagtgccgatggcgccgaggccttgcgcgcgtccatggaaaaacgcctgccgactttttgcggccaataaccccacttcctccgagcaggtagcgccatgcatttccaactcagccaagagcaagacatgttggtggacgcggtacgcagttttgttgccaaggaattgttgccccatgaggcggtggtggaccgtgccgatgaggtctcgcccgagctggctgcgcagatccgtgacaaggccatcgctgccggcttctatgcgttcaacatgccggaggaggtgggtggcggtggcctggactacctgtcccaggccctgatcgagcgggagttgtccaaggtctcgtgggcgctgcatgtgtttgtcgcgcggccgtccaagattcttatggcgtgcacgggagcacagattggcgactacctgctgccgtgtgtgcagggcaagaaaatcgactgtttcgcgctgaccgaacccggcgcgggttccgacgccaatgccatcaagacccgcgctgtgcgccggggtgatgacttcttgatcaacggcagcaagcacttcatcagccacgccgggcacgctgatttcgccatcgtgtttgcggtcaccgatacctacgaacacaacggccggcagcgcaacgccgtgacgtcgttcctggtggatcgtggcacgcccggcatgaccatccgtcgcggccccaagtgcgtgagcaaccggggttatcacacctatgaaatgttcttcgacgactgccgcgtccccgcttccaaggtactgggcgaagtgggcaagggctgggacgtggccaacgcctggctcaccgccggccgtgtgatggtggccgccaactgcgtcggccaggcccaacgtgcgttggatgtgtcgctgcaatgggcggcggaccgcaagcagttcggccagcccatcggcacctatcaaggcgtgagcttcaagctggcggacatggccacacagatccgcgcagcagaactgctgaccctgcacaccgcctggaagatggaccagggcagcatgaccgatggcgaggccgggatggccaagctgtttgccagtgaaacgctgggcaaggtcgccgacgaggcggtgcagattttcggcggcatgggcttgatggatgaggggccggttgagcgcatctggcgtaacgcgcggatcgagcggatctgggaaggcacctcggaaatccagcgccatatcatcgcccgtgaactgttgcggccactgttgcgttgatggcgcggagaacgcttatgtcccaggctaatcgcgacaacctcaagcgcctgttggcgccccggcatctggcttttgtcggcggccgcagcatggcccgtgtgctcaagcgttgcgccgagggtggttttaccgggccgatgtggctggtcaacccgcagcatgacagcctcgatggcatcccctgcgtacgtcgcgtggcggatttaccctgcgggccggacgcggtgttcatcgccaccaaccgcgaacttacactgacttgcgtcgccgaactcggggctatcggtaccggcggcgccatttgctacgcctcagggtttgccgagaccggggccgatggcgccgttctgcaacagcagttactagacgcagcgggtgagatggccttgcttggccccaactgctacggcctgctggactacctgcacaacgctgcgctgtggccggtggcccatggcggcaagacggtggagaagggcgtggcagtgctgacccagagcggcaacttcgcctacaacctgtcgatgagcgaccgttcactgccggtggcctacatggcatcagtgggtaaccaggcgcaattgggtattgccgaactgatggaggtgctgctcgatgaaccgcgcgtcaccgccatcggcctgcacctggaaggcttgaaaaatgtgccggggtttgcccgtgcggcccacaaggccctggaaaaaggcattccgatcatcgcgctgaaaaccggcgtgtcgcagatcggcgccgagctggccttgagtcacaccagttcgctgtccggctccgatgcgctgtacgacagcctgtttgcgcgcttgggcgtgatccgcgtgagcgggccggtgagttttgtcgaaaccctcaaagcggcggcatgcggcaaccttcctgcgggtaaccgcctgatcgcgttggcctgttccggtggcgatgcggggctgattgccgactatgccgaacgcaatcatctggccttgccccagcttgatgaaagccagcgccgtgaactggcacaggtactgcccagttacgccaacctggtcaacccgttggatttcaccacggccatctggggcaatcgcgaggccctcgacgccatgctcgacactaccctgcgcaccgatgccgatgccgccctgttggtgttggattacccggccgagtccacgggtgagcgcaaggagtgcgacctgctgctggagttgttctgcaacgcgctgggccggcatggcaagaccgggtttgtcacctcggcctttcccgaattgctgccggcccatgcccgcgagcgcctgcatgcccatggcatcgcggcgctgcaaggtgtggaagacgcgctggcggcgtgggggcggattgccggctaccagagcaatcgccgtgtgctgctggagcgcggcgaatcaatcctcgaaccgctatgcccgaaggctctgcaaggcagcggtgaggccctcgacgagtgggcttccaaacaagccttgcgcgcgttcggcctgaccacgccaatcgggatattgagtaccccggcccgggcgatcagcgatgcccaagtgcttggttatcccctggtgctcaaggcggtcagcgcgcagttgccgcataaaaccgaagccggtgcggtggtgctgaacctgaaaaatggcatggcgctgagcactgcacttgagcagatgcgcgagcacatcggcgcttatgcgccccatgtcgtgtttgatcaactgctgctggaggccatggctgcgccgccgttggcagagttgatcgtgggcatcaaacgcgaaaacgagtttggcctggcactggtcatcggtgccggcggcatcctggtggagttgctcaaggacagccgcagcctgctgttgcccaccaccgacagtgccatccgcaatgccttgctcagcctgcgcagcgccccgttgctgcaaggttttcgcggccgtgacggggcggatatgcaggcattggtcgcggccattcgggcagtggccgactacgcctgcgccaacgccgggcagttgctggagctggatgtgaacccattgttagtcagtgcccagggcgctatggcggtcgacgcattgatacgtctaggagatgagcatgcacgataacgcgatgaccggcggccaggccctggtgcggttgctggccaattatggggtggacaccgtgttcggcattcccggtgtgcatacactggagctgtatcgcggcctgcccggcagcggtatccgccatgtgctcacgcgccacgagcaaggcgccggtttcatggccgacgggtatgcgagggtcagcggcaagccgggggtgtgctttgtgatcactgggcccggtgtgaccaatgccgccaccgcgatcggccaggcgtatgccgactcgattccgctgctggtgatctccagcgtcaacagcaccgccagccttggcaagggctggggcagcctgcacgaaacccaggaccagcgggcgatcaccgcaccgatcaccgcattttcggctgtcgcactcagtgccgaggatctgcctgaactgatcgctcgcgcctacgcagtgttcgacagcgagcgaccccgcccggtgcacatctcggtgccgctggacgtgttggcggcgccgatcaagcgcgactggagcgatgaagtggtgcgccgcgccggtcgcggcgtgccgtctgcgcaagccttggatcatgcggtggccaagctcgcagcagcccagcggcccatgattatcgccgggggcggtgcactggcggcaggcgaggcgttgcagcgtttgagcacgcagttggctgcgccgtttttcaccagcgtggccggcaaaggcttgctgccgctcgatcatccgttgaatgccggtgccaccctgtgcgtcgagcccggctggcaactgatcagcgaggccgatgtggtgctggcggtgggcacggaaatggctgacaccgactattggcgcgagcgcctgcccctcaacgccgagctgctgcgggtggatatcgacccgcgtaaattcaatgatttctacccctgtgccgtggcgctgcgcggcgatgccaaccagacggtgctggcgttgctggagcgtttgccaaccgtgtcagctgacgcggaaatggcagccaagcgtgtggcggcattgctccaggccgttgagcggggacacggcccgttgcagtccacccaccaagcgattctcgagcgcatcgaagccgaactgcccgccaatgcgttcatcagcagcgacatgacccaactggcctacaccggcaactacacctaccgcagccgcgcaccgcgcagttggctgcaccccaccggctacggcaccttgggttacggcctgccggcgggcatcggtgccaagttcggcgcaccgcaacggccgggtctggtgctggttggcgacggtgggtttctctacaccgcccaggaactggccaccgccgtggaggaattggacagcccgctggtggtgctgttgtggaacaacgacgcacttggccagatccgcgatgacatgctcgacctcgacatcgaacccatcggcgtgctgccgcgcaacccggacttcgcgctgttcgcccaggcgttcggctgcacagtgaaccagccccacaacttggatgagttgcagacggacctgcgcaacgctttccaacgcaatggcgtgaccctgatcgagctgaaacaggcctgcgctgtttgaggaactcccatgaaggttttgattgttcacgcccatcccgaaccgcagtcgttcacggcggccctacgtgatcaagcggtcgccacgctgcaaggccaggggcacagcgtcaaggtgagcgatttgtacgccatgcaatggaacccggtggcgtcggcggcggatttttcgacgcgggaaaaccccgattacctggtgtatgccctggagcaacgcctgggggtgaagaaacagtcgatagcggcggatatccaggcagagttggacaagttgctgtgggccgatctgttggtgctcaactttccgattttctggttctcggcgccggccatactcaagggttggattgaccgcgtgctggtgtcgggcgtgtgttacggcggcaagcgcttttacgatcagggtgggctggccggtaagcgggcgctggtcaccgtgaccctgggcgggcgcgcgcatatgttcggcgagggcgcgattcatgggccgctggaggacatgttgcgaccgatcctgcgcggcacgctggcgtatgtgggctatgaggtactggcgccgtttgtggcgtggcatgtgccgtatatcagtgccgaggcacggcaggatttcctggtggagtatgagcggcggctgcaagggctggcggatgaacagcccttggtgtttccgaaacttgagcaatttgatgaggcgctgtacccgctgtagcagcgccctggtcggtcagcctcgtgcgcgcaaacgctcggcggcgctacgcaacaactgctcggtgccgtcccagcccaggcagccatcggtcaccgacacgccgtacttcatcgacgcgctcaacggctggcagccttcgaacaagtggctttcgagcatcatgccgatcagcgacgtgtcgccctgcaagcgctgctccagcacgtcgttgaataccgccggctgacgcagtgggtccttgccgctgttggcatggctgcaatcgaccatgatccgcggcgccaccttggacttggccaggtcgtgtttcacctgcgccacgctttgcgcatcgtagttcggcccacggtgaccgccacgcagtaccaggtgggtgtcggggttgcccggggtctggatgatcgccgggtggccctggctgtcgacgccgaagtgacggtgcgggtgggacgccgagcgcatcgcgtcgcaggcaatcgccacaccgccgtcggtgccgttcttgaaacctacgggcatgcccaggccgctggccatttcgcggtggatctgcgattcggtggtgcgcgcgccaatcgcgacccagctgagcaggtcatcgaagtagccggccgccatcggttgcagcagctcggtggcgaccggcaggcccaggcgcagcatttcgcgcatcagttcgcgggacaggttgaggccggcggccatgtcgtcgctaccgtccaggtgcgggtcgtaggccaggcctttccagccgatggtggtgcgcggtttttcgacgtaggcgcggatcaccagcagcatctggtcgctgacgtcgagtgcgagcttcctcaggttgcgggcgtattccatggccgactccgggtcgtggatcgagcacgggccgacgatcaccagcaaacgtgaatcctgaccattgaggatggcgcgcacggcgtggcgatgggcgtggacttgttcagtgaggaacgggctgagcggcagcttgagctttaaatcaagcgcgctgggcaagcgctgggtcagggcttcattggcgctggtcagggcagaaacgggcagggcggcggtggcagagttcatattcaaggcttcctgggcaagcggcgggctgttcccgcgcgcctggccctactggggtgttcgacaatgggccgtattggctgtgtgtgttggcttgccacccataggtgaccgatcggaggcggcaggctgtcccgagcggagctggctaaatcgccatgcggtggaagtgtcgtagcggtaataggtggcgtagttcatgtcgtgtgtcctttaagtgttcgtcaaaaatagtggggcctgaaaaacaaaacccccggtcggggagccgaccgggggtttggatttctctggtaggcgaccccttgagtagtgggcgccgatttcaggtatcaggcgcgccagtggctaaaccaatacccaaaataaaagctggccagtgcgctcgaacccttcacacgggtagccgataccgagcgcggggcgctggcagcagggcaaacctgaggggtggtgagttgcaacatggtgtgtctccaaatgatggggggagcttactagagggatgcaggaggattcaatcagtaatttctattgcgcggggggactgactgctatcgaccgagatatgcttgcaacaccttggatgattgcttggacgcgaccatgactgccctgacccttgctgctgctcaatctgtttccatcgcgggcgacgtgccggccaatatcgagcggcacttggcccttatgcacgcggcggccgaccatggcgtgcaagtgctggtgtttccggaactctcgttgaccggctatgaaccgtcgctggcggccgaattggcgattgttcccgaggacgcggtgctggcgccgctgcgcgaaatggcacgggaattgggcttgaccacagtggtcggcatgccgatccgcctggcaccaggggcaggtgtgctgatcgctgcgctggtgttgggggccgacggttctcttgcggtgcacaccaagcagcatctgcatcctggcgaagaactggcgtttgtcgcggggcagggtggtgcggcgctcgacactggcgatgaccgcattgcgctggcggtgtgcgcggatttctcccatggcagtcacccgcgccaggcggctgaggcgggcgccactgtctacgccgccagtgtgttgatcagcgaaggcggctatgcaacagacagcgcgttgctccggggctatgcggccgagcatggcctgttggtgttgatggccaaccatggcgggccatcgggtggctatgtgtgtgccggtcgcagcgccatttgggccaccgatggccgtttactggccgccgcgccgggcctgggtgaggcgttggtgatcgcccgccgcaagggtgctgcgtgggctggtcaagtggtagtgctgtaaatggggtttcacctgcgcgccgcgacggaccaggaattgccgttcgcccgaaccttgacctttgaggccatgagtcgctattacctgcaatacgacctggtgtggtccaacgatggctttgatgtcgcctgggcggaccgcgaaaactggctgatctgcaacgacgaggccgtgctgggttttatcagcctgagccgcgacagccgcgcactctacatccgtgagttgcatatgcttgcggcgtgtcgcaggcagggcgcgggcagttgggtattgcagcagatggcgctcaaggcccaggcgttggggttgctgcgtttgaccgtgttcaagaccaacccggcccgcaggctctatcagcgcatggggtttagcattgtcggtgaggaagactgcttctggcgcatggaacgtatttgcccatcaagctaaaccatgcgctcaatcctaataagcgcatactggttttcaggagacgacttcctgatcgttgttttggccatcagcctcagaaaggatgatcccttctttcatgcccaacaggaccgctaccttatgggcttctccacgccgtccctttttgcgccccgcgagtacttgataggtggttgccggatcaacgccatgttctcgggcgaacgcttgaactgactttccttgatgttccagccaagccttggcttgtgcggcagtgcggattccgggcatagttcaaaaccgttcaagtttgtttaacaaagagatgagtgtgtcacctcttggggtgtgccaaataggatcatacatccaaatgagtggaatcggttcgcgtttgaggcaagaaagggagcgacttgggctgtcgcaaaaagtgtttggtgaaattggaggcgttgaagccaacgcacaaggtaaatacgaaagtggagggcgggcgcctaaagcagactacttgtcccgtgtcgccgaaaaaggtgtggacgtgttgtacgtattgaccggtattgccacccccattcaactggataacctgacccagattgaagaaaaggtactgggagactaccgcgcgatgttcaaggaagaccaggctgcgatccgccgcttgacgtctaccctggccgaacattcagcttcgctgaatggaaaacccaagccgcagccccaggattcctgacctgccgcccaacaaatagagccgttcaccctagggtggacggcgtctgtgtgttcaaactctatatatatgacgcttgcagctaggtctgcgccttggttttttgctaaggtgttcagcaacctataagaccatatcgcgaggtgtctgcttgattagggtgctagtagtcgatgaccatgatctcgttcgtacaggcattacacgaatgctggctgacatcgatggcctgcaagtagtcggtcaggccgagtccggggaagagtccctgatcaaggcccgggagttgaaacccgatgtggtgttgatggacgtcaagatgcccggtatcggcggtcttggcgccacgaccaagttgttgcgcagccacccggacatcaaggtcgtggtggtgaccgtgtgtgaagaagacccgtttccgacgcgcctgttgcaagccggtgcggccggttacctgaccaagggcgcaggcctcgccgagatggtgcaagccattcgcctggtgtttgccgggcagcgttacatcagcccgcagatcgcccagcaactggccattaaatccttccagcccaccagcgactcgccgttcgatgcgctgtcggagcgggagatccagatcgccttgatgatcgtcggctgccagaaggtgcagacgatctccgacaagctgtgcctgtcgcccaagaccgtcaacacctaccgttatcgcattttcgagaagctcgccatcagcagtgatgttgaattgaccctgctcgcggtgcgccacggcatggtggacgccagcgcctgacatgaccacaccgtttgatcccagtgccttcctctcgacctgcagtggccgccccggcgtgtaccgcatgttcgacagcgaggcgcgcctgctgtatgtcggcaaagccaagaacctgaagaaccgcctggcgagctactttcgcaagagcggtctcgcgccgaaaaccgccgcgctggtggcgcgcatcgcccaggtcgaaaccaccatcaccgccaatgaaaccgaagcactgctgcttgagcagacgctgatcaaggaatggcggccgccttacaacatcctgctgcgcgatgataagtcctacccctacgtgtttttatccgacggcaacttcccacgcctgagcattcaccgcggtgcgaagaagcagaagggcaagtatttcgggccctatcccagcgccggcgcgatccgcgaaagcctgagcctgctgcaaaagaccttttttgtgcgccagtgcgaagacagcttctacaagaaccgcacccggccgtgcctgcaataccagatcaagcgctgcaaggcgccctgcgtgggcctggtggagccggccgagtatgccgaggatgtgcgccactcggtgatgttcctcgaagggcgcagcaatgccctcaccgacgaactttccggcgccatggagcaggccgccagtaccctggactttgaaaaggccgccgaactgcgcgaccagatttccctgctgcgccgcgtgcaggaccagcagagcatggaaggcggtaccggtgacgtcgatgtgatcgccgccttcgtcaacccgggcggcgcctgtgtgcacctgatcagcgtgcgcggcggacgggtactgggcagcaagaacttcttcccgcagaccggtatcgacgaggacgtggccgaggtcatggcggccttcctgggccagtattacgtgagcagtcccgaacgcgacctgccgtcggagctgatcgtcaacgtggtgcacgaagacttccccacgctgatcgaggcgatccacgaactgcgcggccgcgagctggacatcagccaccgcgtacgcggcacgcgagctcgttggcagcaactggccgtgaccaatgccgaacaggccctgggcgcgcgcctggccaatcgacagcacgtcgccgcacgcttcgacgccctggccgaagtcctcaacctggacgaaccgccgcagcgtctggagtgctatgacatcagccactccagcggcgaggctacggtggcatcctgcgtggtctttgggccggaagggccgatcaaagccgattaccgtcgctacaacatcgaaggcgtcaccgccggcgatgactatgcggccatgcaccaggccctgacccgacgtttcagcaagttgaaggacggcgagggcaagctgccggatatcctcctggtggacggtggcaagggccagctgtccatggcccgcgatgtactcaacgaactggcggtgcccgacctgatcctgctcggcgtggccaagggcgccacgcgcaaggcgggtttcgagacgttgtacttgaatgatgccgcccatgagttcaccttgaagggcgactcaccggcgctgcacctgatccagcagatccgcgacgaagcccaccgtttcgccattaccggccaccgcgctcgtcgtggcaaaacccgacgaacctcaaccctggaaggggtggcgggcgtcgggccgacacggcgacgcgacttgcttaaacattttggtggcttgcaggagctatcccgtgccagcattgacgaaatagccaaagctcccggtatcagtaaaaagctcgctgagttgatttatgcgaatctgcacagcgaatagaatgcctttccacctcgtagccagttgtgccgatgaatatccctaatctgatcaccgttctacgcgtcctgcttattcctattttcatcctgttgttttatttgccgtacgaatggagttatgcggcctccagttcggtattcgccttcgcggccgccaccgactggctcgacggctacctggcccgtcgcctggaacagagcacgccgttcggcgcgttcctcgacccggtggccgacaaactcatggtcgccgtcgccctggtcctgctggtgcaggaacacggcaacctgtggctgaccctgccggccgccgtgatcatcggccgcgaaatcgtggtgtccgccctgcgcgaatggatggccgaaatcggcgcccgcgcccatgtcgccgtctccaacatgggcaaatggaaaaccgccgcgcagatgctcgcgctggtgatcctgctggccaacccgtcggacttctccttctgggtgttgaccggctacgccttgctgcttatcgccgccggactgaccttgtggtcgatgctccagtatctgcgcgctgcctggccgcatctgcgcaccaccgttgaaaagaaataaaacattttcgaatcaaggggttgaccggttctgataattctatagaatgcgcatcaccaagacgcgggaatagctcagttggtagagcacgaccttgccaaggtcggggtcgcgagttcgagtctcgtttcccgctccaaacacaaaaaaaagccactctaacgagtggcttttttttgcctgctgttccgtccagaatcgtgtccgccattcgaccagtctcgattggcgattgttcgcgcagcccaacggtcagcgcctgaaagcctgccttttggccatcgagacaatcaatagcgccggcagcagcagcgccaatgcaacccagggaatagcgctcgcccctcggcttcccaggagaacaccgccgatcacaccgctgcctgcaaatgccaggttaaacacggtgaccagcattgattgcgcaatgtcagcgccgtctccggcaacttcagccaaggcggtttgcaataaggttggcgcgccaccgaagctcatcccccacaagacgatactgatgtagatcgcactggcgggcaggtcacccagcccaagggcaagcgacaccaggctgaatgccgtcaggctgagcagcaccaggctgcgaagcctgccatcaatcagcgtgccgatcacccataggccgaacaaggccgcaataccgaatgcaagtaggccccgatcaacctgatcggccaagccaaccgaagccaggaacgctgcaatataggtatagagcgtgtaatgggccaggatccagagcatgaccaccgccagcaccggccgcacccccggggtttgcaagactctgcgcagcggcaggtgccgataggcgcgttgtccgggaaaatcaggcactttcagatagatccaggccatcagcaaaaggctgagtcctgagagcgtcccgaacacgcatcgccatcccagcagtttgccgagccaggcacccagcggtacccccagggccagtgctaaagggatgccgagcatggccagcgccatggcgcgaccttgcaattgtggggcgaccaagcgtctggcgtagccggccagcaggctccaggccagaccggtggcaatgcccaccatgaagcgcgccgccagcgtcaatgcaaaccagggcgacagggcggtgaccgcattgcaggcgcaaaacaccgcgaccgccagtaatagcaacaagcgccgaggccaaccctgcaacgcgagcgtcaaaggaatagccgccaaccctgagcccagtgcgcatagcgtcaccatctggccggcccacgcttgcgacacacccaatgcctcggcgatctgtggcaaaagtcctgcgggtaccgtttcgttggcggtggcgataaagctacccattgtcagcgccaacagggccgccagtggcagacgcccggtggtgagatgttcgagagtgttcgatgtcgtgaaagagccattttcaacatgtgatttgccagtcatgacctgtgctcagtgggaagggagggacaagtgtgatgaattgccacagatttgataattggcctaccatttgatgatctatcaaatttgaattgaatatgaccactgaccgattgggtgatatgcgtttgtttgtcgaggcggcggcactcggcagcctgtctgccgcaggacgcaaactggcactgtcgccagctgcggccagcgcgcgcctcatcaagcttgaggcggcgctgcgcaccaaattgtttgatcgcacaacccgtcagttgcgcctcacggaagaaggtcggttttacttgcagcagtgctgggtcgcattgcgggctatcgatgaggcggaagcggggcttcaagccagtcaaactgaagtgcgtggcaaggtgcggatatccgcgtctgccgactttggccgcaatcttttgaatgactggcttgaggcattcagtgtgttgcaccctgaactgtgcgtcgcgctgacgttgtcggattcggtgtcgaatctggtgcaggacgatattgatctggcaatccggtttgggcagccacatgaaagctcgatgatcgccaggcagttagcgcccaactggcgagtactgtgcgcttcgcctgactacctggcgcgatacggtgtaccccagacccctgctgacctggttaaccacaagttcatcgtgctggtgactggcgcagggccattgaacacctttcactttgtggtggacggtcaggcatggaaccacaccgtgcccatgagccaggcatgggagaccaacgatggcgcactcgcgcgcgcatgggcgttggccgggcatggcattgcacgtaagaccatctgggatgcggcagccgatatccgtgctggacgattgaaagtcctgttgcctgacttttgtgtcccggaggccggcgtctacgcggtattacatggcaaccgttaccgggttccccgcgtgcgggtcttgctggatttccttgtcgagcagttcgatcgcgcaaccgatgagctgctgtcaggtcttgaagtgcctgatgccaggcggtcgtaagccacgtcataccagataggggcgtggtcgctcagccttgggttttcctggcgcgggatttcttctgcgcaggttgagcgtcgccctcatcgagcgcgtcgccccccaggctgcgggtcagctgtacggcagcgctctgaaacagtgggtgcaacgtctgtgcctgttcggcggtcagtcggctcgcggggccggagagtaccagcgcgccaatcaggttttcccccgggccgaaaatcggcagtgccatcgaggaagcgtgcgggtccgtggcgcccacggagtaaatcggtttcatcattttcgccgccagggagtacggcgttctcaacgcttcggcgccggcggcgccgtccatggggcgcgtatcaccgggttgcaggtgcaggcgcaagtggtgcggtgagttcacgcgatagaggcacattcggtaagcgccatgcctgacataaaaggatgccgtttctccggtttcctgggtcagcgtgtgaagcaatggggtgatatgccgttccaggtcgagcccgtcctggtagacggtattcaagcgcatgatctccgtggccagttgatagcggccgtcggccaggcggctgatcaggccgtaattttccagggaaaccatcaagcgcatgatggtgcttttgatcagcccggttcggtcggcgagttcagccagctccagggcggtgtcgcccatcttgaacgcggtgagcacggtcagcacccgatcggccgaagcaaccccggtgactgccgggcgcgggcgaatttttaccatagggtggctccttgtgagggtggacgtgggctgtgcgtgagcagggtgcaaaatactgccattgtcgcgcgggggcaatgcgcgcgaaggattggccgcgcgcgctaaataaaacgctgctggcggggcggggcccggcagcagcgagagtgcagcctataggggaggtcagcccgcgctggcttccttgttgaactccacgggatcactcgatttgttcatgtgcttgcgtccgatcaacagcaccatgagtgcacccagcgcgcacagtgccgcgagcggcagcagggccaacgcatggctgcccgtggcatgctggatcgtgccgtagacgttgaccataaggccgccgccgatcaggttggccatcgcacccactgccgccaggcctgccgctgcggtggaggacgacagccaggtcgacaccagggcccagaacggtcccttcatcgagtaagcaccgatcagcaccatggacatcatcagcacggttgccaccagtgaagaggtcatcagcgccagcaacaggccggccgtgatcaacaacagggtggtcgcggtgtgccagcggcgttcaccggtcttgtcggagctgcggccccacaggatcatcaggatcgacgccaggccgtacggaatggcattgaccaggccgatttccaggttattcaagccaaaggtcttgagcaattgcggtgcccagacactcatggtgctgcctgccgccgaggcgccggaatagatcagcgccaatacccagatgtgtttgtggcgcagcagcttccacaacgagatatgcccgatggcggtcttgcggccgcgttcttcggccagtcggttggtcagccagccacgttgctcgtcactcagccatttggcttgctcggggcgatcggtcaatacgaacaggcaggcgatacccagcaacactgcgggaatgccttcgatgatgaacaaccagtgccagccgcgcatgccaaaccagccgtccaggctcagcagaaggccggacagcggcgagccaatgaagttggcgccgggaatggcaaccatgaagatcgcaaccatgcgtccacggtaggcggccggcaaccagtaggtgaggtaaagcagtacgccaggaaaaaagccggcctccgcggcgcccagcaggaagcgcatcacatagagcgagttggcgccctgcacgaatgcagtgcctgccgaaatcagcccccaggtaatcatgatgcgagcaatccagacccttgcaccgaagcgctgcaaggccaggttgctcggcacttcgaccaggaagtaagagacaaagaacaggctgctggcaaagccgaagatcgccggtgtcaggcccaggtcctggttcatctgcaaggaagccatgccgatattgccgcggtcgatgatcgccagcaggtagcagaggatcaggaacggcagcagccgccacgccaccttgcgcatggttgagcgctcaacggcgctgatttcggtagagctggtagacatgactctctcccattttgttttttttggagaagcgttatgacccgcactgctacttgaggcgtgcgggttgcatgaattcaatcactgcgcatagagatgacgattgaccaccgcgcgcgggtcgggcgcgatgccgccccagaaatcgatgatctgttgcacggccagcagccccacgcggtcccgcgcttcggcggtattggcgcccacatgcggcgtcgccaccagggtcggcaggccccatagcggcgagtcggcaggcggcggttcggggttgaaggtatccaggccggcgccgccgatctggcccgtgctcagggcttttaccaaggcatcggtatcaatcagctcgccgcgtgcggtgttgatcagcaggctgccggggcgcatgcgcttgaactgcgcctcgccgaacaggttgcggttctgctccgtgagcgggcaatgcaggctgatgatatcgcagtccgccagcaaggcatcgaagtcactgacctgctcaacgttgggcacgtcaggcaggtttttcaggtaggggtcgtacaccttgacctgcatgcgcagcgggccgaccagctccatcagaattcgaccgattgagcccaggccgaccaggcccaaggtcttgcccgacagctcgacaccgaccgaggtcgctttatcccaatgcccatcgcgcatccgtgcatccagcagggcggtgtggcgggcgacgctgaacatcaacgccagtgcatgctcggcgaccgactgcgcattggcgcccagggcaatggtcacgggaatgctgcgttcggcggctgccgcaatgtcgatggtgtcgtagcccacgccgtgcttggcaatgatcttcaactgcgcggacgcctggatcatgtcccgcgtcaggtgaccctggcgcacgatgattgcatcgggctgttcgcgcgcaatgatcgcagtgagttcgtcggcgggtaggtaggggatggtcggtatgacgcgcacgccgtgtgaggcggcgtgggccatggcttcggcagtcaattcagggccggtcagcaaaagggttcgggtcatgttgcgcaccttggtttttttatctgtgtgcagctggggggcgagtgacatgaccctcagcggtgactaaaacctaacataatgaaacggcgttgcaattaaaaagatttttttcaggtgtgaatgccgttctttggtcatgccgtagtgcctgtttttttcttgataaatcagcattttatttttgaatgagctgattttcatgtcttggtgcagtcagcgtttacgcgacgagctgcacgcaatgcttgcttgcaagtcaaaaaatgaaatgataatttcgaaatagcgtttcattttaattattctgcagtcgcgccacggcttacaaaaaacataagaaggtgaccccatgtccattggtttcagagtgctcgaacaagctcgcaaagtgcccgccgaatgggttgagcgctaccggacggtgcccgtcgccaacatcagcgactcgatgaaccgcatgaccgccggcggcgccagcctgcgtgccatgcaccgtcagggtgtgttggtgggaccggcactgaccgtcaaggcgcgcccgggcgacaacctgatgctgcattacgccattgacatcgcacagccgggcgacgtcatcgtggtggatgccggcggcgacctgagcaacgcactgatcggtgaaatgatggtcgcgtatgcggtcaaaaaaggggtggccggcattgtgatcaacggcgccatccgcgacgccgccagtatcggtgccggtgactttccgctgttcgccgccggcgtcacccaccgtggcccttacaaggacggcccaggcgaggtcaacgtggcgattgcgattgatggcatggtcatcgaaccgggtgacctggtcatcggcgacgaagacggcttgctctgcgtgccgtttgatcaggtcggtgaagtgtatgatcgtgcccacgccaagcatgctgccgaacaaaagcagcttgaacagattgcccagggtgaaaacgaccgtacctgggtcctgaaatctctcatacagaaaggctgcgagctccctggctgatcccgctacaccctggccgccgtgttcggccagggttcacgggcagggcgtcgcaggcttcatacctaaaggctcgctgtgacttctgttcccgtctcccgttggcccgcgccgatccgcgcattgagccatcgcaatttccagatctacttcgtgggtcagggcctatcgaccctgggtaagtggattcaacaggtcgcactggcctggctggcttatcacttgacgggttcggctgtattgctgggcacgattgctttcctgacgctgctgccccaattgttggtcggcccactggcgggcgcctggtcggaccgccacgacaaacgccgcctattgatgggcgtgcaaaccctgcttgccctgcaatcgctggtgttggccgtactcacctggcagcaatggatgggccgggaggtgatcatcgtcatggcgctgattctcggcttgctcaatgccctggaaacaccgctgcgccaggcgttgatcagcagtttcgtcgacgaccccagggacttgcccaacgcgctagtgctgaacgcaatgctgatcaacgccgcccgctttattggccctccgctggcggggttgctgatcaactggagtggcgaagccggctgttttctcctgaccagtatcgcgtttggcatgttgctgatcgggctgggcagagtgagaagccgcgagcaaaccaaggcccagggttccaccgcagagattttccgtgaaggcctgcgctacctgtggcgcacacttcatattcggcgtttgctgatcagcgtgatcatggtcaacctgctggcctcttgttacacggtgctgttgccgatcctggcaaaaaacgtgttcgccggcgatgcgcaaaccttgggttggttatggggggccgccggtgccggggcgtttgtcgcgacgattttcctggcgtttgtcggcggtgcgtcgaacctgcaacgcatcatcggcgccggggcactggtgtgtgcgatcgccttgtgcgcgatagccgccaacccgccgttgtggttcacgctgatcgtgctggcgggcttggggtttggcatcaccgtgagcaatgtcagcagcaacatgaccctgcaaagcaccgcgcccgaggcgctgcgcgggcgggtgattgcgttctacatcgccatgcgtttcggcttcgaagcgattggtgggttgttggcagggctggcggctgcagccttcagcgtgcagtggaccttgttgctggccggtgcactgctgttggcgtatcagggcgtcagtggatggttgtcagttcgcaggcaccgttctggcagggggccgtcagggtgacagtcggttcgctgctttgctggcaggcgactcgacagaacgcggcgctttaaccgacaccgataaccgcacgttatttcatgtccctggcctggatccacagcaccgcatcctgggacaggggtttgcccttgtaggttttggtcgcgccgatgttgagcgccgcaatgccccaccagccagcgcgtggcaggccgatggtcacgatgccttgggcatccgaatacgtactcaaggatttgaaggcggcttggggggcagtgacatagtccttctggccaaaggcgttgtttttgatgtcgaccgcatgattgacgtactcgatttcgatctcggcgaatggaacaggcttgccgtcagccaggaccaacgcgcggaacaccccacccgtccagtttgcatacggcttgttcaggggttggatctcaaccgccaacccttggggttctgacccattgccgggcacgccgcccacgttcacgacgagcttggtgaactgttggatgtagacgccttcctcggtttccagatacggctcaggttcgagtacgaaaatatggtcgcccaggggccgcaccaactcccgtggaatcgacgcacgataggcggtcactggtttttcgcgaccctgccactggacgggtttgaggtattggcgcaggtcggttgtttttccgccgtggccgctgatgaggctgaaggccttgggttcacccatggccatcgtcggcccaccggagaacggatgcgtgaacactatagcgaagtccaggtcggccgcacgctgcagcgcggtttcgtcaaggtagagcatctggaagtgcgcttgcgctgcgcaggtcatgcaaccgaaggtcgcggcggcaaaggcttggagcagtcgtcgtttgatcagcatggtcgggctcactttgagatgtcagaggactggatcgtggcgccatggttttcaccaccgaggaattccaccgagtacgcgccggcgggggcctggaacgtgtagctgttgtccttgtcgacagtcccttcgagcaatagcttgttgctggggtcctggacatggatttttcgacctgcggcggaactgccgtcggtgtagccggcttcacatttcacccagtcatcgtgctcgatgtagcagtcgaaaacggggccgtgggccagcgcggcctggcagaacagcagggcacctgccagcagtatcgggtgggccagatctcgcggtttcataaggtttcgttctccatggtcgaagtggatcactgcggcgtcgccgtttgggcggcagccactgcgggagcggccggcgcgaaggccgccagcaaggcgtcgaggttggcactcagcagcgcctcgtagctgttggccgggttggcgagcatgcccgggttgccgctatccaggatcagcaggcgtgcgccgccgtcctcgatggcctgtgcaatcctggcgtcaggcgcccatttgtgaaccaccacgcggatatctcgctcgcgaaggtagcgggtcagggcggcgcggtcggcgtccgtccagtcgatgtcctggcgcacgaaccaaccgtccacatacacgccgaactcgccgaacaggtagaccggctcgctgaccagcgacagcacgcgcaggtctggcactttcagcagccgatcgccgtagtcggccttcaggcggcgcatgcggccgtcgagcgcagcgaggttgcgcgcgatccgtggcgcgtcggttggggacagccgtgccaggtcggcggcaatcaatgccgacatgcgcatggcattgatcggccccagccaggcgtaaggcgacgggccgccttcgccgttgcgggcgtctgcccagggcacatcgtttgccggcacgcgtgtcacggccacgccgggcttgaggctgtcccaagagtgcgacgcatcgatctcgacgatccgcaggttgtggcgccgcgccgtcgtatacaacgggtcggcgcgccacaggctgctcagggtgaccacggcgacggccctctggaacaccgccggctccaggcgcgacagcgcgttggcctggctttccaggggcacggcggcgtccagcgggacacgtacgacctcgatgtgcgtgccttcgccgagtgccgaggtgagcgcatacatcgccggcagggcgacgagcactggctgttgctcctgcgcaaaggctgacggcacgccacccagcagcagtgcgaacagtgccagccaagggcgaattgaagtgttgaaccttttcatacgctggcccctttgaactgcggcgcggtgccgcggatgagggtggtgaaggcaaataccaaggctgcgacgatcacgatggcgccgcccgtggggaccggaatatggaactgcatcggtgccagaatcccgaccacacaggaaaaggtcgcaatcaggaccgcccacgtgaccaggcccggcagtgagcggctgatgttgcgggctgcggctgccggtatcagcagcaaggcctcgaccagcacggcgccgatgatcttcaagcaggcgaccgttaccagggtgaccaacaccacgaacaggtactcgacgctgcgcacctttacgccgcgcgcatgggccaggctcgggttgaggctggagagcaacatgccgttgtacaggggcagcgcgatcagcgtgcaaatcaccgtcacgcccagcagtacgttcatgtcggtgtggtcgaccgccaggatcgagccgaacagcacgccttccatgacgtgtgtgttgattttcgcggacacgaacagcagcaatgaggcaccgaccgccagcgagatggacaggaacacgccgatcaacgtgtcattggccagggtggtgcggtgctgcgtgtacttgagggtcagggcgaacagcaggcagaagccgaacatcgagaagtagggcgaggtgtaggactcgccgatcagcacgccaatggccacgccggtcatcgccgcattgcccacggactggctgaagaacgccatccgcttgatcatcaccatcgaacccagcactcccagcagcggcccgatcagcactgaacacatcagcgcattgatcacgaactcgtattcgaacggttgcggcaacatctggctcgcggcgagcgcctggaggtggtcgcgaatgaagtcgtacagggcattcatcgaatggcctccagtcggctgtcgagctgatcggcagggccgtgaaacagcacccgttgattgataacggtcacggactgcgcgatacgcttgacctgttcgaggtcgtggttgatccacaaaatggtcaccccacggcggttcagctcggccactagcgcctctaccaggcgcacaccaggctcgtcgatcccggcggtcggttcatcgaggatcagcagccacggcatcgggctgatcgcctgggccagcagcacccgctgacgctggccaccggacaggctgccaaagggttttttacccatccccgccatgccggtacgctccagggcctgggcatgggccgccttggcggcgcggcttgcgccgaggaaggcgggccggcgttgacccaacagggccatgagatcgttcactgtcatcggcacgttgcggtcgaagtccggcaactgcggcacataccccatgggcgtcgtgggttcaccctcgagccggatcgttcccgaatgcggcatctggcccagcagcgcacgcaccagtgaggttttgccgccgccgttggggccgaccaggcagtgcaatgcgccggcctcgatgcgcatgctcacttgatcgagcacctgcgtgcctcccagtcgcagggagacgttgtcgaacacaatggcggggccgcgcatcgcgtgttgctccttcagcgcgttcattgctgcgtaaactcgacggcttgcgccagggtctcgaggttttcgcgcatcgcgacctcgaattcgtccgcgctgtagctatcgccggtgatatgagacagggcgaacaccttcacgccggtggcggcttcgatgggtttggccaggtcgagggagaagttcttttcggcgaacagcaccttgacgttggccttcttgatcgcctcgatggtgttggccaattggcgtgccgtcggtgcgacgccatggcgcggctcgatcacggcgcttacgaacaagccgaactcctgcatcatgtagtcgtagccggcatgggtcgtcgcacagcggaacgacgacaggtccagtgcggcgaagcgcgtcatgaagcctgcgcgcagcgcacggatacggccggcatacgccagcgcattcttgcgatactcgcccgcgttgtccgggtccagctcgcccagccggcgagcgatttcgaacacctgttggatcgctgccgtggtcgagacaaaggtgtgcgggttgaccaccttgaccccttcctggtcaccgccgatgggaatcagcgccaccgtggcattcgcctggataatcggcagcgtttgcgtgcggccggcggccttgatgatctggaaggcccattcatcgtgcccgataccgttgaccaccagcacatcgatattcatcgcgcgggtgatgtcatcgggttgcggctggtaattgtgcgggttggcctctgccggaatcagcgcaatgacttgcgcccgatcgccgacgatattggccacgaagctgtagtagggatgcagggtgataccgattctgagtggcttcgccgaggcgaaggccgggccggcgagtgcgatggcggtgatcagcacccacagcgcgatgcaacggcgccacacggcgcgatgtttcgtagaaacagtcatggctgggttccttttacgcgttcgatttcgctggcaccgtcgtacgggatgacttggcgccaaccatcgccgaccagggattccggcttgacgatggcggggtagggcgcgttcgggtcacggtggacccagatcgtcgcctggttggcccacatcacaccggcgtgggcgtggccgatgatcagcaggtaggcgctctggcccggcgcgtggccggctgagccgtaatagaccgtggcgccctggcccagggtggccttggacacatcgctgacggcaggggccgccgccgtggcgtcgtccgctccacccggatgggccaggtgggtgccgggcagaatcaattgccagtgcacctcgccattggccttccagaaagcatcacggtagaacggcggcagcaacagctcctgtgcacgctccagggtgatccagccgccggtatcgttgttgttccagatgatttcctcgccggccggcagcaaggcgctgtggatggcctgatcgaccgcacccaagccgtcaaaggaacgcacctgccagctcagtggggtgggggggccgactctttccgggcgcagcatcacatagccggccacgctggcgatgacggccagggtcgccagcagcaggcccagtgactcccatgcgccggagcgtggtcgcacctgggtgatcgcagcggctgggcgcgccatcagaggaacgcaatccagcggcccaggaagaccacgccggcccacaacagcaacgagctgaacccggcgacacgcgcctgacagggaggcggcagcgtcgtgtcccattcggcaattcggcgaaaggcgcccaagtggaacaccgccatgttggcgccggccagcatcagcaggcccattttcagcaggaacgcggtgttctgcacataggtcgtgccattggcacagaacatcagcaggccggtgatcacgcaggtcacgaacgcgacccaggtgtagggcagcaaatcctggatcagtttcagcgcgccgcgccggtgggcggttacgccaagcaggcgcaggtcaacgacggcgatggtgccgtagacaatggcgatgccgattacgtgcaccgattccagcattggaaaggccgagcctgactcgcggatgaacgtcgcgacaggcgtgtcctggatggcttgcagcaggggttgaatatccatggcgaatacctgagaactttcgttgaaaacacttagatcgtgtaggcgatccagcgaccgcaaatgatcacgacgcaccacaaaccgatcgacagccatgcgcatgccttgaccgaacgcgtcgtgtcgtcgctgcctgccgtgccggcagggcgcagcaacggacgccgcagcagccaggtcacgctgaacgccgtcaccaccaggaccatcttcagccagaacgtggagttgacgagtacccggtcaggctcggcgatgatcatcagcaacccggtacacagcagcacgatcagtgcattgcgcatccacgggtagtaacggcgaacgatgccgcgcaagggttcctcgcgggcgaacacccccgccagtcgaaggtcggagatgagcgccgagccgaagagcacggtgatggcgatgatgtgaatgctctgcaccgtggggatgacccacaggatgtcgcggatcgcagtgctgaacggtgaggcgtagatccaggcaatgatgagtgaagatgacatcggcttttcttccgcagtgggttagaagtcttgaggggttgcgatcggatgcagccccgccgcgtcctccggcagcaagtagccttccttgatcgaagccgctttggcgtcttcgaatttctgtgcatagcggctgaagcttccatagtgcttgcccagcacttccttcgaataaggcactttggtgtcgtagatcagcccgcagccggtctcttgatcggtgaggtaggtggcgctgggcacctggatccacggcgggcgcacaccgccttgcaggttgccggtggcgggcgcccgcgcggcggccttgccatcacggaccacccggggcgcgcggggcatgggtttgccgtcgcgtacccattggtccatgccgtcgagcagtgccgagaccacgtgctcgaccggttcgtcatacagcgtctggcagcgcgggtcgtcgcccttgccgacgtcggccgcgagcggttcggtgtgctctgtgccgaggtcggccaggcgcagatggggcatgccggtcacttcgtagtagcgaagctgcggggtgtcggtgtcgggaggcagtgggataccttcgatcacgtcgtgcatcagttcggactggctgaagacggtcacgaacggcacgccttcgggcatctggcgaggtactcggatcacatcgccgccgacttctccgtaggccatgcggcccgtcatgtaagcgtcgatcagcggcgtatcgtcgggcatgcgccattgctggtgacgcccctggtcgagatagtccatccagacctgcgcggtgacggcccagctattcacatacacgcgctgcacatcgaggcccgccagcggactctgcgccccattgctcttgagcagcagcgccagttgcgcaccgatgccctgggactgtggcacgaagggatcgggcgctgcgccacgggtgaaccgtgccgggtcgtaataggtgcccagcggcgcatagcgcgcgtagtcgaagcggcgcatgaactcgaaattcacgatccgtccgtactggtcgatttgcgccgcctcggccgccggggtgtccgaaatgaacttggggtcgactgacggcttgttcacattcagtgtgtacccgacgtacgcatagccgcgccgcagcaagtagtcacgcgtcagtatccagcctgcgccacgctcgccgaaccagctgaacggctcgatcaccaccgtgccattgaagcgcgccgggtcggccggtttgcgcaccagaatgcgcgtggtgtagggcgcttccagcaaggttttaccggcggcagtgatggccggggcgacgccttgcaggtagtactcttgctcgatgtagccgtagtggtcgaggtcgctgtactcagtgcccgggcgtgtcgccgacgacagcggcggcttgtcggaaggcggcaccgcgatggccgtgggcatgcgcggcacctcggcgagcacgctcgacgcgatgaacagcgacaacgcgatgctgatgggggtcaggcgtttcattcgcaaaagctccggcaggggtgggagggtggcgtcactcaaggctcagggaagccttgccctcgctgtcgatcacgatctggttgttctcgcacacgtactcttgaatggcgtagttggagcgcttgtactcgaacgtaaagcgatacggagtgttgagtacctgcgggtcttcgatcaggacctggttttccaggtgatccggcccgcgcaaccgcatgcgttcagtgatcttcatcgccggcccgtggggcacgtcgtagaagcgcacatcggttcgcacgcgctgggtctcgacgaccagcgtgtcgccttcccagtggccacgcgaatggccctggtacaacgggtcgagcttttccaggggcggcatgggctggttcaaaagaatccgccgcacctgctggagatactcgccgaggatgatcacttgcttgtcgtcgcgaatgatctggatcgggaacagcgctgccatcatcgtcggcatgccctcgggcaggcacttggagctggtggttgcaatcggcgtgccggcctcgttggccacggcttctttcttcttcagctcggcgtactcggcggcgtaggacgccttgaggtccattgggccgccggggtgcaccgggtcgtccgggttctcgccgaaccagtcgtccggggttctttcccaggtgccgctgatgtctggccgtgtggccacgccgtgtttgtcggttggggggtttgacgctgtcgcggcgctgctcatcgcggcgaaggtcaggaggaccacccccaggaagaccatggcggtgttggcggtgcgtgctggtttcattgaaatgtctccgcgttgctggtttgcccagttctgttgttgtcgtgctcgcaaagggttgcgtttaaccgccgcccgagagcaccacgtcgcccatcttgatctccaccagcagcccgcccggttcgccgtttttcaacggtttgaacgacacctcggcgtttgcgccggccttgaccgagtcggcagtccagcctgtgcgctgcagcgcgttgacgctgcccgtctcgatcttgaagcgctgggccggcgggccgggaacatcgacgtagatcgtgatgtgcgggttggtccaggcgaagcgctcgaccacacccttgatcgtgattgtctgggtctggtcgaacagcgcgaaggaatggtgggcactggcaacaggcgccaaggcactgcaggcgatgagggtcataaggcaaagcctttgacggagcgacggaaagcgtgacgaaggggtcatgacgggtgcctcggtttttatggttcttatgggcccagcatagggtgctcgcgctcactggccgtagccgaaaacggcaaccattgaaggtattcagggggggtggcgcaggtgaggtatcgcgcaacgacagaacgacgcgccggcccgtgcagatgctgatttgggttaccgcgttggcgacccctgccggaacactcgtgtctcgcctcacaactataaaaacaggagagacgtcatgcgcattcccccctacgcgccattactgtcgctggttgcactctgtgcagtcggctcacaggcacaggcttatacgctgtacaacgaagacgacggagcaaccgtgttgaatgccgacctgggcgccgcattcggctggtttggcagtacccataactacctgggcgatccgcagaaaaaatccggcggcatgcactggcaggagggttacgtcaaatacggtctgaccggcaccacggataagctggttgccggttcggtatatggtggcttcagcctgctcagcagcgggtcatggggtgacggagacatgggggcgaccacggcgggcaatgagcgacgaaccgccgtggaagacgcgttcctgggctggcgatcaggtgacctgctacccgccctgggcaaggatggcgtggatttctcattcggacgccagattgtcacggtggacggctttctgatcaccgacgatggatttgacccgggtaacgccttcaaccccatcgagggcgtgcaggatggccgcttcaaccgagggggcgccttttacctgggccaacgcctggcgtttggcaatacggcggtgctgaagctgggcggcaaggaagggttgcacggcagcttgatatggctgaagtccgataaccctgggcagtccaagaccgaactggccgtgggcactatcgattacaccacccccatcggttcgatcggttcgacctacgtgcacggcctggatgtggaagagaaatacgccttcggcgatcggcttgagcgcaagggcatgaacgtctacagcattcgcgggcagggcaacgccgggatcgagaacgccgattttgcgttcgaggtggcccgccaggaaaaacgttcggggtcacagcgggcgatgttcttcgacgcgggttacaccttcgtcgatacgccatggcaaccgacggtcagctaccgctattcgcgctactccgaaggctgggacttcctgttccagggcggttatcgcaagcgcctgcagggcgaagtcgggcttaattatgcgggctccgtgacatcgaacatgcagatcaacgacgtactgctctcggtcaagccgaccgagaaattgacccttaacgcgatggcgttcgactaccaccagctttcccgccgtcatgagctggatttcgctgcgcaggagctcgatctgtttgtggattgggcggtcacggagaacatcacgctttcgccgctggttggcttctacaagccgcagaagtggctgggcaacggtggccggcagagcggcgacgcatcaaccaacacgtacatgcagttcattgtgtgggcgacgttctgatgattcattgaggtttgttgcggggccgagcaggcgttgacgttttgcgtcaacgcctcatcccgtcagagcatgcggcgcaacacatcgttgcgtgggtcccggtcatagaagcgatgcttgagcgcgcccgccacgtgcagcacgatcaggacaagcaaggtgtaggcgaggactttgtgcagccattggaagaccgcgaaccaatcgtcattctttggcaacagctccggcaggttaaccccaaaaaagaacaccccgtcgctcatcgtgtacgtgctcgacatggagtaccccatcaagggcacgatcaccagcagtacatacatgacgcgctgcgtcaggcgtgacaaaaccctttcgtaccccgccagcgtttccagcggctgcggcaacctgggcgtgcgcaagcgcacagcgagctgaaccagcaccaccaggaacgtcaacaccccgaaggacttgtgccaggggtagtaaagctcgtatttgctcgccacctcatcgttcatgccggtcatatgccagccgacccagagcaggcccaggacgagcacggcacgtacccagtgcagcacgcgcagggaggtcgggtaccgatcgattgtcgattgatctattgggttcatatcaggctctccacggagcgatgcacggttcaatggccaccctcgacgtgggagggtggctcggtcagggcgcggtgatcaggtgggcagcagcacggtgatgactttctcctcggtgtaggccagtgcgccgctgaacccgccttcacggccgatcccgctggtcttgaggccgccccacggcaggttggcgtccaacgggctccaacagttgatccccacggcgccggcttttaccgccgcggcgacgcggtgtgctctggccaggtcgccggtccagaccgtcgccgccaggccgtagctgctgtcgttggccagggcgatcgcttcggcttcgtcgtcgaacgttatcagcgtgccgaccggtccgaagatctcgtcccgggcgatttgcatgtcgttgcgcgcgttggcgaagatcgtcggacgcacgaaccagccctgcttgggtgtcgatacgccgccggccaacaaggtcgcaccttggtcgatgcccagttggatgtagcggttgacgcgatcgaattgggctttcttggcgaccgggcccatctgcacgccgggctggcgaggatcgcccacgttcaccgcttgtgcagcctcggccagcgccgcgccgaaccgctcggcgatgctgcgctgcaccaggatacgcgaaccggcggcacacacctggccctggttggcgaacaggccgagcgcgcagccgcgcagggcgtcgtcgaaggatgcatcgtcgaacacaatctgcgggctcttgccgcccagctccaaggccacgcgcttgaacagcacgccggcggtgcgctggatttcgcgcccggcctcggggctgccggtgaagctgatcttggcgacatccgggtgttcgcacagggctcgacccacttcattgccgtagccggtgaccacgtttatcacgccgtccgggaagcctgcttcctgcgccagctgcgccaggtacagggctgactgcggggtttcttcggaaggcttgatcactacggtacagcctgccgccagcaaggcggcgagcttccacaccgtgatcatcagcggtgagttccagggcacgatggcgccgaccacgccgactggctcgcgcaccgtgtacgacagggtcttggtgccgaagtagcccccagtcggaatggtccgaccttcaagctggttggcccagccggcggcggcgcgcaggttggcgatcgcgttgggcaggtccatccggcgtggttcgatgggcgagcgcccgatggcgttggcgtccagatcggccagcacgtcagtgtcacgctcaaccaggtcggccagtttcgacagcaaccggccacgcagggcgccgttgagctggctccagtcgccgctttcgagttggcggtgtgcagcggctacggcacggtccacgtcctcgctcgtaccccgtgcgcagtcgccgtatacctgctcggtcacggggttgacgaggtcgattcgacgacggtcgaaggcttcgcaggaggcaccttcgataaaatggttcaagtgctcagtcattttggggtccttgagtgatgggcaaaatcaagccttcagggcagccagggcgtcgccgaagatatccagtgccttgaagaacagctcacgcgagatcgtcagcgagggcatcacgcgcatcacgttgctgtaacggccacaaggaatcatcagcacgccgtggttgagcaggtagcccatcagttggccgattttctcgcccgccaggggcgccttggtgagcgggtcttcgatcagctcgataccgatcatcaggccgcgcccgcgcacttcgcccaccaacgggctgttgaaaccacgaatatgcgcctgtgcctccagccccaatgtgtgggcgcggttgagcaggtcgagttccgggtcctggaggatgctgatgttggtcagtgccaccgccgccgacagagagtttgccgcgaaggtgttgggcatggagccgtcgggaatctgcgccgccaggtccgagcgcatgatcaggccggccatgggcaggtcgctgccgatgcccttgccgaaggtgagcatgtccggtttcacgcctgaatgttcgaccgcccacatcttgccggtacgccccgcgccggattgcacctcatcgacgatcagcaacgtaccgctgcggtcgcaggccttgcgcaacagttgcaggaattcgggtgagggcggcacgtagccgccttcgccctgcactggctcgacgatcacggcggccacgtcatcggcggcggtgtagggggtgttcagcaggtagtcgatgtactcgccggcgatctgctcggcgcttttgtgggtggtgtcgaaggggaaccggtaggcgtaagggtagggggcgtggatcacgccgcccatctgggcaccgtagcctttgcggtacgcggtgcccgtggtcagggagcccgatgcgttccagacaccgtggtagccgccatggaaggcgatgatctggtggcgtccggtgatgcgcttggcgaacttgatcgcggcttccagcgcgtcgctgccgctctgggtgaagaaagtgatgcagtcgccacgcaagccgtcgggcgcgatctcggagagcttggcggccagctcggtgcgtcgggtgctgttgatctcgagggcatgcatcagcacttccgactgctcgcgaatggcttgcaccaccttcggatggcagcggcctacgctgctgacgccgaccccggcggacaggtcgatgtaggtattgccgtccggatccttgaaggtcgcgcccaatgcgcggtccatggccaccggcatacgtccgccaccacgtgccattgactcggtgcgcgccgacagcgccagggcttcgagggtcctgggcccaggaatggtctcggagatgatccgtggggcatccgcaaaatgcagggattctagtttggcttcactcatgacggtctctctggaatgtcgattcaagtgtgccgatcatctccggggtgcattccagacgggtagcccgaatcggcacatgggaaagcgtgtccgtggcgggctgctgccaatcggaaaagtgacaaataatttgcaggatttctgctatgtgcgaatatcacctgggaaggcaagctaaaaataagaatatcggcagaggctttcggcattatgaaaaaccagaccatcagccattcccaggacattcacgttcacgccgccactgttcagcagtggagccaggactacagccaattgacggctgggtccgccgaatgctcactcatgcagttgacgaccgccggttgccacgtattccgcgagcagatcaaccagcgtgtcgtgcaacacggcgtctctccccgaggcaagatgtgttttgcggtgccgatcaatgttcccggtccgattcgcatgcaagggcgggaggtggacgacagcagcctgttctttctccatggcggcgaggagttcatgttccacatgcctctgggcatggagctgttgtccatcaccttcgagcgtgaactgttcgaacaggccttggcgcaaaccgcttcggcgaaggagctcaacctgttattgcgccaaccggtgatccgggtttcggccacacggttcgcccaggcgcgtcgtcgtctgctgacgctgttctctcaggccctggtgcaggaagagctggacagcacgcgcgatttgcaacgcgagcaggcgctggaacaggccatgttgggtgagctgctgcaactgatgactgacccggcctgcgacaagcaacagcgctccaccagttccacgcgcagttttattgtggagaaatgccatcgcctggcgaccgagcagatgctgaatgtgccgagcgtcatcgagttgtgccagcgtctacaggtgagtcggcgcacggtgcagaacagtttccgttcggtgactgagacgacccccctcaactacttgcgctcggtcaggctcaacggtgtgcgccgcaccctgatgtccactcccgcgtcccacctcaccatcggcgatgccgccgctcaatggggcttctttcacctcagccattttgccgccgaataccatgagctgttcgcggaattgccctcccatactgcccgtgccgccattacgcgttgtgcttcggtctgatcgaactcacaaggatgtagaacatgaatagcctgcgccgcctgctggcggtcttcgatttgtttcgcccggaccagcccgtcattgacgtcgacatcatttgccgggaactcggttatacaccggccactgcctaccgttacctgcgagagctgggggatgcgggtttattgaagcggttgccccggggttatgcgctgggcccgcgcattgtcacgctggagcaattgatgactcactatgatccgctgctggcgtgcagtcaggacctggtcgaacagttggtcgccgacacaggcctggatgcgttggtcagtgagtggcatggcgactcagtggtcaatgtactggtccagcgtggcaccgatgccggaccggtgggcggcggcagggggcagccgatcagccttttccacagcgcgacgtcccgggtggtattggctcacttgctgccacgccagatccgacgcgtgtatgacgctcacgctccggtcgctgacagcccgcaacaagggctggaatggaagaccttcaccaagagcctgcttgccattcgcaagcaaggctactgcgtcagcgacggtgaactgcacccgggacgcagtggcgtcgccgcgccgattttcgacgacaagcggcgggtcatcggcagcatgaccctggtggggcgcagtgaacgcttccatgcgttccagcagagctacctgcgttacctggtgaccggcgcggcgtcggagttgaccagccgcatcgccttgcgctgagggcggcggggcaggcggcgcgacagatgaccgatttgggctaccgaagcgttcccggcaggcctaggatcaggccctgcgtgcgatcagaacgacaagcgactcggtgacggtgcgagatggactgcgccgatcctacggtgactgcctcatcctataaggtcaacaaaatgagcgtgactttgccccacaatacgccccacaacccgccccacaacgcgcccccaaaaaaacccgacgaaaccctcgacacgacgtcgcccaaccgctctaccgagctcaagcgtggcgccctgggtgtcggtttcatcatcttcttcgtggtgtcggcggcgagtccgctcagtgtgatcgccggcggtttccccattggcatcatgctcggcaatggcgcgggcaccccggctttgctgatcctcgccttgctcgtgctgctggcgttctcggtgggctacaccaccctgtcccgacatatcaccaacgccggcgggttctacgcgttcaccgcccgtgggctgggtggcctggccggcggcgctgccggggtattggcgatgtttgcctataacatcctgcaggtcggcttgtatggcatgtttggcggggtggtcagtggcaccatgcaaagcgcattcggcctggtattgccctggtggtcctactcgctgatggcgatggcgagtattgcgatcctggggtatcgcaagatcgacctgtcggcgcgggtgctgtcggtgatggtgatcgccgaatacctggcgatcctgatcctggatttcgccattctcaaatccggcggcgacagcggcatcaaccttgattcattcagcagccaccacgtattcagcggcaccccgtccatcggtttgctgttctgcttcgccgcctttatcggctttgaggccaccaccatctacggtgaagaggccaaggatcccctgcgcaccatcccacttgccacctactgttcggtgttgctgatcggtggtttctacgcgttgtcggtatggtcgatggtggtgggggtgggggcggacaaaatcgtgccgatgctgcaggcgttgcaggatccgaccacatttatctatggcatgtccgaccactttgtcggcccgcacctgacccaggtcatccgcgtgctgttcatggtcagtatctatgccgggttgctcgcctttcacaatgccgccgcgcgttacttctacgccattgggcgtgacggtttgttgcaccgccagttgggcaccacccatcgcgtgcaccagagtccccatatgggttcggccttgcagagcctgatttcggcggtggtggtgctgattttcgctgcgatggatgccgatccgatcctgcaattgttcgcctggctgtccaacctggcgacgttgtgcgtgatcttgctgatggctctgacttctgcggcggtgctggttttcttccggcgccaccccgagctcaaggtcggtgtttggcgcgggcagattttccccggtttctcctgccttgcactgtgggtggtgctggtgctggcggtggtgcatttcgatgtactgaccggtgccagccaactgttgtcctacagcctttgcgccattattccgctggccctgttgggtggtgtgttcctggcggccaggctgcgcaaagtatcccctcagcggttcctggccctgggcagccacaagctttaaggcgcggcctgcgctgctggcttgctcagcttgaccagcagcgctgcaatcaacagcagggctgcggacgccgccagcaccgcgacaaagcctgcgtcaaacgccgaacgggcggccgcgctcaacatcgcgcggccttcgggcgacaaggtttcagcgaccaccagcgcatcgtcaagactctcgaatgtcgccgggttgcgggtcagccacgctgggatcatcacgcccgccgcattggcatagatcgctgacagcaggctgccggcgagcgtcacgcccaccgcgccgcccagctcaaaggacacttcttcgatggacgccgccatgcccgcctggtccgcaggcacgctgagcatgatgctactggatgaagcggtcagcgcggcgccaatcgtaaagcccagcagcgcgaggctgatgatttgcgcaggtgccgtagcgttgtagagcaacaggtaggacagcatcgccgctgacgacaacagcaatgtccagaacagcatgcgttggttcccgaggcgaggcaggtaatacccggcaagcggcccggagatgaacgagcccaggggcagcggcaggatgaacaatgccgcctccagcggcgacaagcccagcaccagttgcaggcgctggctgaacaccagttccatgccgatcaacgcagcggctgataccaccgctgaaataaccgcgtttctgaaccccggcgccttgaacagcgcgaggtcaagcatcggttgtgtggctcggcgctggcggcggatgaacagcgtcagaaacagcgtgcccagggccattgccaccagcatgccctccaacgacgctgcccgcttgccgagctccttgacggcatacgccacgctgatcaacccgatcatcacctggagcgaccccagccagtcccagcgtttgctgatatcccccggatgattggggatcaacagcgcgcccaccaccaacgccaccagcacaatcggcacattgatcagaaagaccgaaccccaccagaaatgctccagcaacaggccgcccaccaccgggccgaacgcagcgccccctgacgcaaccgaggcccagatgccaaatgccatggcctgttcgcgtgggtcgctgaacgtcacgcgcacgatcgccagcgtggcgggcatcatcatcgccgcgccgaccgccagaaacccacgcgcgccaatcagtacgccggcggtgggtgaaaacgccgcgatcagcgagaacaggccaaatacgccgagcccgccgatgaacaggcgtttgtgcccgaggcgatctccgagcgtacccatgcccaacagcaggccggcggcgatcagcgcataaatgttgacgatccacagcttctgcgaagccgaagcgttcagctcgcgggtcagcgtgggcagggcggtgtagagcaccgtcatatcgatgacgatgagcagcaatgcgctggaaataatcgcgaggatcagccagcgtcgaggagaggtcatgggacgcgctcggtgatggaaagaggaaagccggtgccggtcagtctgtataagccgccggccccttacacacggaaatgggccaccagttgttgttggtgattggccatgtgatgcagtgagtcgctggcttttgaagcatcgtccatccggctggcgagtgtttcgctgataccgcggatgtcgctgacccgatggctgatgtcttctacgacggtgctttgctccatggcggcactggcaatctgctgattcatctgttcgatcacgtctacggcctgggagatgcgctccagcgccacccgagtctgttgcacctggaccacgctgccgctggcttgctcgcggctcagttgggtactgtgcaccaccgactggctcagctgctgcaaggtctcgatcaccgtgcgcacctgttcgactgaatgctgggtgttgctggccaggtgccggacttcgtcggccaccaccgcaaaaccacggccctgctcgccggcccttgccgcttcgatggccgcattcaaggccaacaagttggtctgctgcgcgatggaactgatgacgtcgaggacctgaccgatctgggcactgctgtcggcaagcgcgttgacctgcccaagggtggtttccaggcgctggtcaagggcctcgatactgcgctcggcggtcgagaacaccgcctggcctgagcggctcgcgctttctgcggcggtggcggcgtcggcagcactgtgggagtggcgcgccacttcctgtgcactggcgctcatttggtgcagcgcggtggccgccaactccacctcgtgatactgacgctgcatgccggcactgacttcacgggctatgccagacgaggtgtcggcgctgttgcgggtgtccagcgacgcgctctggatatcgcggataatcggctgcaacgtgtccaggaaccggttgaagccattggccaagtggcccaactcgtcgtgcctgccgacgggcaggcgctgggtgaggtcgccgtcgccttcgacaatcgcatccagcaactcggccattttcagcagtgggcgtgtcacgccgtgagcggccagccagatcagcaacatgcccaggctgctggcaagcatgcccaggcccaggttgagccagttggactcacggcttttgctgtccaggtcgttttgcatttgccgggcaggtgcctgcacccgtgcctgcgggactttgatcgccagttgccaggccgggccgcctgccacggtctgcacggactgacgtatatcgagggtgtccccggagacttcgccactgcgtcccgccacttggcccgaggccgacacaatggcgacttcgctgtcgccctggtacaggtcctggccgaggttggcggccagcttctgcaacgtatcgaggctgatatccatgcccacgacgccgagcaccttaccgttgacgatcaacgggatggaaatgctgctcatcagggtgttccggccttccacttcgatggtgtacggctcgatcacacacacccgtctttgcgcttgagggcaggcgtaccaggcgtttccgggttcgctgccgggcggcgcggtgttggcggcgatttgtgcctcgctcaacacctcctgcaccaattgccccggctggctctgcgaccaatacagcgcaaagcgcccgctgtcgttccccgccattgcgcgttgaccgcgccaatcggcatccgcgccggccagtgcatcaggcagcatgatgacgtacaggccgaggactttttcgcgctgtttcagggtttcacgggccgtagcgatcaatgcttcgcgcaattgcgcgaccgtcaggcgcccattgagtgtctgctcgcgcagttgcagaacctgttgcgcgaacccttcgccatacaaggcggtttcgttgaaaaaacgctccacctgttggccatgcgcaacggcctgggcctgcaagcgttccagcgcagcctgcccgagcaacgcgttgctctggtctttaagcagctttgcactggttttgttctggtacgcgctggcgccaatcagcgcccccaccaccgccagcaggcagagtccgctcagcagtgtgatacgccattggagggtgaggtgagctagacgcatggctgaggcttcctgcagagggctttggcggcgatgggctgggcagcgagccctggtttttatgcttgttgccggcacccgggcatagcgcgggtgatcctaggttgcggggatgacaggccaggcggctatcccaaatcggcaaggccggtgggattgcccgtgcagcgccgacctgttttggggcggggctgtggatgctaccgatttgggatagcgagcggttcgggggcgggcataggatcaaattcagcgcgtaaccaaaacaagacgctacccggtgccgatgcggtgtggtcgggccaaccctaaagcgactgcctcatacaataaggtcaataacatgagtgtatctatcccggtcaacagctccacggagctcaagcgtggcgccctgggtgtgggcttcatcatctttttcgtaatatctgcggcgagtccgttaagcgtgatcgccggcggcttcccgatcggcatcatgctgggcaacggcgcgggcaccccggcgctgctgatccttgccttgctggtgctgctggcgttctcggtgggctacaccaccatgtcccgacacctcaccaatgccggcgggttctacgcgttcaccgcccgtgggctgggtggcctggccggcggtgctgccggggtgctggcgatgtttgcgtacaacatcctgcaggtcgccctgtatggcatgttcggcggggtcgtcagtggcaccatggaagccacgttcggcctgctgttgccctggtgggcctactcgctgatggcgatggcgagcattgctatcctcggttatcgcaagatcgacctgtcggcgcgggtgctgtcggtggtggtgatcgccgagtacctggcgatcctgatcctggacttcgccatcctcaagtccggcggtgacagcggcatcaacctggattcgttcgaccgcagccatgtgttcagcggcaccccgtcaatcggcttgctgttttgcttcgccgcctttatcggttttgaagcaacgacgatctacggcgaagaggccaaggatccgcaacgcagtatcccgattgccacctactgttcggtgttgctgatcggtggtttctacgcgttgtcggtatggtcgatggtggtgggggtcgggtcggacaaaatcgtgccgatgctgcaggccttgcaggacccgaccacgtttatctatggcatgtccgaccactttgtcggcccgcacctgacccaggtcatccgcgtgctgttcatggtcagtatctatgccgggctgctcgcctttcacaacgccgccgcgcgttacttctatgccatcgggcgcgacggcttgttgcacagcgtgttgggcaccacccatcgcgtgcatcagagcccgcatatggggtcggcgttgcagagcttgattgcggcggtggtggtgctgattttcgcggcgatggacgctgacccgatcctgcaactgtttgcctggctgtccaacctcgccaccctgtgcgtgattttactgatggcgctgacctcggtggcggtgtgtgtgtacttccatcgccatcccgagcttaaggttgggatgctgcgcggacgcatcctgccggggttctcatgtctggcgctggtgctcgtgctggtgctggccgtggtgcatttcgacgtactcaccggcgccagccaactgctgtcctacagcctctgcgcgattattcctgcggcgctgattatcggcattgtgctcgcaatgcgactgcgatcgcgctcgccgcaacggttcctcgccttgggcagccacaagctttaagagcgcagcggttttatagctcgactaaccagacaattgcagcctgtcgttgctcggcatggctcgtcagcgtgtgaaaggaaggtttcaaatgcacaactacaagatgctcatcgatggggttcaagtggccggtgaacgaggccagtttgacgtggtcaacccggccaccggcgctgcatttgcacaatgcccggcaggctcgctggggcaactcgaccaggcggtgaatgccgcgcaggcggctttcaaaagctggcgccacagtagccacccagaccgttgtgaacgtttgctggcgattgccgccgatatcgagcgcgaggccgacgcgctggcccgcctgattgtgcaggagcaaggcaagccgctggagctggcgtttggcgaggtcatgggggccgcggcgtggacccgctacgcggcggctcaagacattgcggtggagctggtggaagaaacccccacccaacgcatcgagctgcaccgcaaaccgttgggcgtcgtggcgtcgatcaccccctggaactggccgttcatgatcgccgtctggcacatcatgccggcgctgcgtgccggcaactgtgtgatcagcaaaccgtcgagcctgaccccgttaagcacgttgggcctggttgaaatcattgcccgccacgtgccccgcggggtgatcaactgcgtgacgggcgagcagggcttcggcagcgcaatcaccgcgcataccggcatccagaaaattgtcttcaccggttccaccagcaccgggcaaagcgtgatgcggggggccgccagcaacctcaagcgcctgaccctggaattgggtggtaacgatgcggcaattgtattgccaggaacgccggtcgaggcagtggccgaagagatcttccaggccgcctttctcaacatgggccagacctgtgcggccctcaagcgcttgtacatccacgaatcacagtaccaggcctttgccgacgcgctgacgcagatcgcagcgcgccaggtggtgggggatggtctcgacgccggtgtcacgttcgggccggtgcagaacctggagcaactggaactggtggaggccttggtcgccgacgcacgcgccaacggcgcacgggtgctgtgtggcggggcgcgcctggatcacccgggttttttctatccccctacgctggtggcggacgtcaccgatggccatcgcctggtcgatgaggaacagttcggccctgtgttgcccttgattgcctaccgggatgtcgaagatgtgctgcagcgcgccaacgctggtgacatggggctcggtggctcggtctgggggccggatgtcgagcaggcccaggccttggccagtcgcctggagagcggcgttgcctgggtcaactgccatgcgcagatccagcccaatacgccgtttggtggcagcaaaatgtcggggtttggtgtcgagttcggccttgaagggttactggaattcacaggccagcaattgctgttcgtgcgcaagcgcgatcccgcccaaggagcttgaacatgtacgaaaaatacaagaccgccgagaaaaagttctggcaccccatggggtccagtgccccggcgcagcgcgccaaaacgctgatcatcgcccgaggtgacggcaattacattacggacatcgacggccagcgcatgctcgacggcgtgggcggcctgtggaatgtgaacattgggcacaaccgtgccagcgtcaaggcagcgattgccgcgcagttggatgaattggcgtattaccagaccttcgacggcattgcccaccctcgggtgttcgacctggcagaacggctgaccaccctgttcgcccaggaacgcatgacacgggtgctgttcagttccggtggctccgatgcggtcgaaaccgcgctgaaaatggcccgccaatactggatcgccagtggcgaaccggggcgcacgcggtttctgtcgctgcgtaacggctatcacggtgtgcatatgggcggcacatcggtgggcggtaacggtgtctaccactacaaccatgggcagctgttggccggctgccatttgctcgacaccccatggctgtatcgcaacccctgggattgccgtgatcccgaagcgctgacggcgcactgtattcggcaattggaggagcagatcgcgttgctgggcgcgcagacggttgccgcattgatcgccgagccggtgcaaggtgccggcggggtgatcgtaccgcccgccagttactggccgcgcctgcgggaggtgtgtgaccgccacggtattgtgttaatcgccgacgaagtggtcacggggttcggccgttccggctgcatgctcggcagtcgtggctggggcgtcgcgccggacatcctgtgcctggccaaaggcatcacggccgggtacatcccgctgggcgccacgctgttcaaccaacgcatcgtcgacgccatcgagaacgggcctggcttcagcagcatggtcatgcacggctacacatacagcggccacccgaccgcctgtgcggccgcgctggcggtactggacatcgtcgaagccgaggacctgccgggcaacgcggccagagtgggtgcgtacttgctggaacagctcaaaccgttgaccgagcgctacccggtgatcggcgaagtgcgtggcaagggcctgatgatcgcgctggacctggtggtcgataaggccacgcgccaccccctcgacccggctggcggccaaccctcgcggatcgccgacgaggcgcggcgtgccggtgtgctggtgcgaccgatcggcaacaagatcattctctcgccgccattgaccctcaccaccgatgaggcggacttgatcgtctctgcgctggatatcgccttcaccagctacggctagtcgccgttaaaacggtgcggcaaaggctgcacccacgtcatgccaatacttaagacagccttttgaaaggcgcacctccaggagcttgagccatgcggtatccattgcgtcgtcccgtgttcggtagcacgttcgtgtgcacattggcgctgtgcgccattcaacaggcccaggcctatgaggtgtacagcgacgacagccggcacctcaacgcggacatgaccgcggtattcggtcagttcaacagccgcaagaactacgatggcacctcgggcggctccacatggcgcgagggttatatcaaatacggcctgagcggtgaccaggccttgggcggcaatggctccgcgtatggggcattcgcgctggtcagctccgccacctggggcgacggtgatccgggcggaaacagcgtggggacagagcgtacgactaaaatcgaagacgcctacctggggtggcgctccggcgatctgtttccggcgttgggcaaggacggcgtggatatctccggcgggcgtcaggtggtcaaggtcggtcgcggcttcctgatcaacgatgacggactgaacctgggcaaaggcccggccgatggcaccatgaaccgtgggggcgcttactacctggctgcccggcatgcattcgaccaaaccgccgtgctgcgcctgggtgggcaagagggcctgcacggcagcgtgctgtggctcaagtccgacaaccgcgtccaggccgaaaccgaactggccgccggcaccctggattacaccgcgcaaccgggcacgcttgggctgacctgggtgcatggcctcgacgtgaacgatcgatgggccagcgactttcagcgccagcgcaagggcatgaatatctacagcctgcgcgcagagggcgatgcgggcgtcaagaacctcagcctggcgtttgaatacgcctggcaggacaaggacgccgggccggagaaagcctggtacggcgaagcgggctacacctttgccgataccgcctgggcacccaaggtgacctatcgctatacgcgttactcgcaaaactgggatgcgctgttcaccggcttgagcatgggctatggcacctggttccagggcgaagtggccggtaactacgccgggccgttcaacagcaatacgcgtatccatcacgtcgggctgaaggcaaccccactggaaaacctgaccctgggcgcgctgtatttcgattacgacaccgtgcgtaaaagcacggcgttgaacctcgatgcccgcgagctggatgtgtacgccgagtgggtggtcaacccgcacttgatcatcaccccgctggtggggctctacaaacccaagcaggactcgaccaccggtggcaaccaggtcggcggcaacggcaccaacctgtacagccaattgacggtggccgtgccgttctgaagggcgcgggctagggcgcgataccgctcggcgcgttatgcatgttttcggcaatgcgccgggtggtgtccatcaccatttcaatcacggtttcctggcgcagcagcttgaagctttgggtgctgccgacggccgacaggctgccgaccacttcgtcgaggtccgtctggatgatcggtgcggcgataccggtcaggcccaggttgagttcgtcgtgggtcaggcagtaaccgtccttgcggatctttttcgcggccttgctgaaaccggcccagtcatagggactgtcggggtcgctggccatgtgttcgtcgaacaggcgttgcaggcggcgacctttctgataggcgatcaaaaccttcgattgtgccccgcgaaagaacggcaacggctgcccacgcccgaacgcgaagtgataggtgtcggcgggttcggcgatgtaggtgttgatgatgcgcccgtcgtaaaacacgctggcgaacaccgccaggccggtttgcgcggacagctcgtgcatcagctcgcgcccggcgagcaggatcgggtcgtactggcgcattttccagtccagctcgatcacccgcgggcccaggccatagctgccggcatccacgcgggtcaacaggccggcatcgcacaggtccttgacgtagcggtacacggtggcccgtgacaggcccatgcgctcggcgatggtgtcggggtcgatcttcaacgtctgtgggccgaacaggtccaggacgctcagcaatttgctcaggctgctcatttcgttcctaaaaggggggcacgtgctgcattccgtgggcgcaacactaccgcagtgaaagaaaaacgcaatcttttgtgctttttagatcatcaaaaaatcacataaatctcattaaatgagacaaatcaaaataaaatgcttgttgattggatttttgtgtgtgataaatctcatcactgcaaacgctcaagcaagagggctgaaaatgaatggtgcgcaactgatagtgaatgcggcagcggcaagcggtatcgagtactgcttcgccaaccccgggaccaccgagattcccctggtggcggccatggccagcgcacccgctctcaagccggtgttgtcgctgttcgaaggggtctgcaccggcgcggccgatggctatggccggattgccggcaaaccggccatgaccctgacccacttggggcctgggttcgccaacggcatcgccaacctgcacaacgcacgccgtgccaacacccccatcgtcaacgtgatcggcgaccacgcctcctggcacgtcaactacgacccgccgctggccagtgacatccaggccctggccggcgcggtttccggctgggtgcgcacctcgcgcaccgcgtcgggggttggcgaagacctgcaggaagccatgcgcgcggcctggcaggccaaagggcagatcgccagtttgatcctgcccatggacctgcaagcccacgccgtgacccacaacggtgtgttcgccccgatccgcccgccggtgcgccgctttgccggtgaccgcatcgagagcgtggccagggccctgcgtgacggcctgcgcctggtgtttatcgtcggtgacgaaggcttgtcggtggccggcctggaagcggcggggcgcctggcgcaactgccgggcgtgcgtctgttcgccgagacctttccacgcctcagctaccgtggcggtggcctgccggacctggaccgcctgccgtacttcccggaagtggcgattgaaatcctcgaacaatacgacctggtggtgtgcgccggcgtgccggagcccatcagctacttcggctacgaaggcatcccgtcgcgcctggccgaacgtgagcgcctgctggcgttggccgatgtcggtgacgatgtcgccggcgcgctgacggcattggccgacgccctcgatgcgccggcctatataccgacgccccagggtatcgaactgccgcccggccatgccgagctgaccccacagtcggtgggccaggtgctggccgcctccctgccggacgacagcattgtctccgtggagggcggcacctgcggctatccgttcttcaccgcttcggcccgcgccgcacggcatcgggtactgaccaataccggcggcgcgattggccagggtatcccggtcggcttcggcgccgccctggccgagcgcggcaaccgtgtgtactgcctgcaatcggacggcagcgcccaatacaccattcaaaccctgtggagcattgcccgcgagcaattgccggtggtgatcctgattgccgccaaccaccgctacgcgattctgcagaacgagttgcgccgcttcggcatgaccgaactgggccctgaagccctgaagctgacggtgctcgacagcccgcgcatcgactggaaagccctggccaaaggctacggcgtaccggccagcacggtgcacaccaatgccgaactgcaacgggcgctggccaatgcgaatgccgacggcgggccttgcctgatcgaaatggcgctgtgaaggagtcgaccatgaagctgtttgaagtgttacccgccgtccaggcctttctgtcccagccgggtcgcctgtttatcggtggcagttggcaggacgccgccgatggccgccgcttcgcggtggaaaacccggccaccgaagaaaccctgaccgaagtggcccagggcggtgcgcgggatgtggacgcggccgttgccgctgcgcgctcggcgttcaacggcgcctggtcgttgcagtcaccggcccagcgcggcctgttgctgttccgcctggcggacctgttggaccagcaccgcgaagaactggcgcagctgatcaccctggagaacggcaagccgattgccgcagcgcgcggtgaagcggccagcgccgcgaccatcctgcgttactttgccggctggccgaccaagatcgaaggcagcaccttgccggtgtcaccggccagcggcgcgccgatgctcaactacaccctgcgtgaaccggtgggggtctgcgcgctgatcgtgccgtggaatttcccgctgaacatgtgcgtgtggaagctcggcccggcactggccaccggttgcgtggcagtgctcaagccggccgaacaaacgccgctggtcgcgatccgcctggtgcagttgatcgaggcggcggggttcccggccggcgtggtcaacctggtcactggcctgggcgccgaaaccggcgcgccgctggcggagcatcccgatgtggacaagatcgcctttaccggctcgacccaggtcggccggctgatcgcgcaagcggccacgcgcaacatgaaaaaggtctcgctggaactgggcggcaagtcgccgaacatcatcctgcccgacgccgatatcgtgcgcgccgccaaaggcgccgccgatggcattttctataaccagggccaggtgtgcacggccgcttcgcggttgtacgtgcacgccagcgtgctggatcaggtccttgaggaactcgaacggcacgccgccgcccacgtcctcggcaatggcctggacccggccagcagcatgggcccgctggtgtccgggcgccaactggcgacggtcaagggctacctgcaacgcggccaggaagaaggcgccgaactgatctgcggtggcgggcgtccggaacacctggagcgcggccactttattgcgcccagcgtgttcctggatcgcgccgaggcggcctgcgtggcccgcgaagaaatcttcggcccggtactgacggtgatgagctggaccgaaatcgacgacctggtcttgcgcgccaacgattcgccctacggcctcgcggccggcctgtggacccgcgacctgcgctcggcgcaccgcgtggcggcgcagctcaaggcaggctcggtgtgggtcaactgctggaacgtggtcgatgcggcctcgccattcggcggctacaagcaatccggctggggccgggaaatgggtaagaacgtgatcgatgcctacaccgagaccaaaagcgtgtttgtcgatctggcctgaactgaataatcacacgaggtaattgttatggatcttgaattgaaaggccgcgtggccattgtcaccggtggcggcatggggatcggcaaggaagtcgcacgttttctctccgaagaaggctgcaaggtggtgatctgcgcgcgccgcatggcgttcctgcaactggccgccgaagagatcagcgcccagaccggcaacgaagtgctgccgctgttctgcgacaccaatgacatgtccgccgtgtcggaaatggtcgaagccgcctacaagcacttcggccgcatcgacatcctggtcaacggtgccgctgcgccgtccggcgtcgtgcgcaacgacatcgagcacgctggcgacgatgagctgctgtcggacctcaacaccaaggtgatcggctacttccgttgcgccaaggccgtgaccccgcacatgaaggccgctggcttcggtcgcatcatcaacatcggtggcctcaccggacgcagcagcaaggtgctgtcgggcatgcgcaacctggccatcgcgcacatgaccaagaccttgtccgaccagctcggcccgtcgggcatcacggtcaacctgattcaccctggcgtggtggataccccgcatatccaggagctgtatgaccgtgaagcggtcaagcaaggcaagaccgcggaacaggtcgagcaggcctacatcgacgcgacgccgattcgccgcaccctggcaccgattgaaatgggctggttgattggtttcctggcgtcgcccaaggccggcgcggtgaccggcgagtccatcggcatcgacggcggtttgacccgtggtatctatatctgaggagtatctgtgatgagtaacggaacccttttggttgccaccgtcgggcaagcggtgatccgcagtgccgacgatggccgtacctggcatcgcctgggcctggggcaggacctggaattcgatgcaatcactcgctcactgagcctgcaccccgacgcgcccgaggtgatttacgccggtaccgacgtgggcttgtgcgtcagccgcgacaccggcggccattggcagcgcgtcgattcgccgttcaacgggcagaccgtgtggaaagtcgcggtggacccacgcaacgcacaacggattttcgtcggcaccggggcaccgtcccgcgccgtgttgtggcgcaccctggacggtgggctgagctgggatcgcgcaccggtggagattccggagttctgcgacggcgtcagtcgcccacgcctgctggcgtttgcctacgacccggtcgaccccgaccagttgtggttcggccttgaagagggtgggttgttccactcccgcgacggcggcgacagctggacccgcgtcgatgaccgcctgttgtgggagttcaactcggacgtgcacaacatcctggtgctgcccaaccatggccagaaagtcatcgtggtggtctgcgtcaacgcggtctaccgcagcctggacgaaggcctgacctggaccggcatcatcggccgcgaagccttcggcctgtattacatccgcgccatgaacgcgccgttgggcacgcaaagcgacctttacctgagcatttccgatggcacgccgggcaccaccagcaagatcctggtgtcccgcgatgcggcgctcagctgggaagtgctgccgctttcccagcagcccaattcctgtgtgtgggcgattgccttcaacccggccaacccacggcagatcgtggcgggcaccaagtacgggcacctgttcacctccgacaacggcggtgacggctggcagaaacagtggcgcgacttcagcgagatcgctgacgtgctgtggacgccggctgtggcgcagatcaaggccgggcatcaatccatcgtcaagaagcactgaggtatatcgccatgaaagtcgagatcctgcgtactcacctatcgctctgggtcgctgacccggacgtgtcggcccgctggtacgccgacatcctgggcatgcacgaaagtgcccggggcgagagctgggtcatgatggcgtttggcggcaagcaccacgacattgccttgatccgcgccgaccccggcgcccatcagggcgggctggggctgcaacactacggcctggaaatcgacggggacatgaccaccctgcgccagctctacggcatgttgctgggcaagggcgtcgaggtggtgaagatcaccgatcacgaaatcggccatggcgtgtacttcaacgaccccgacggcaaccgcatggaattcttcctcgagaccgaacacgacgatgcgcgcggcaaggcccggttcaaggccgctggcgcgccgagccgacatttcaacctggacccactggacccactttgaggcaaaccccgatgaaaaccgctaattttgcgacctatcacatccgtaaatggtacagcttcgtcgaagaaaccctggccaacgaaaccggccagctggccgatggcgagccactgttcaaatatgcaattgccgccgtgatcgccaacccttatgccggtcgctacagcgagtcgctggccgaactggtcgacccttcgccgctgctgggcgaagaatttggccggcgcatccaggcactggccggtgcccatgagattgtcagctatggcaaggcgatcctggtgggcagcgagggcgaatacgagcacgggaatgcattcctgaccaacccggccgccgatccgatccgtgttgcgctgggcggcggcaagtcctgggtaccgtccaccggcaagcgcggcgggccgggttcgaccatcgatgtaccgctggcgcacaaggatgccctgtatgtacgttcccattacgacagcatgtcgctgatgtttggcgacgggcctgcgcccgacgaggtcgtgatcatctgggcctttgccacccgtgggcgcttgcatgcacgcctgggtggcttgcaggctgaggacgtgaaagggctggatgggctgcactgaggcgcatggctttggcgacgccggattaaaaccacaacaagaagcggtgaatagcgatgaagcaggagaagacccaggttgtcattgtcggcggcgggcccaacgggatcacggccgcacactatatggggatgtacggaatcgactgcgtcgtccttgaactggctgattgcatcctgccttacccgcgtgcggtgggcatggatgatgaagccctgcgcgtgttgcagggtatcggcatcgccgagctggccgtgcgcgatatgatctgcgacgtgccgttgcgctactacaacgcacgcggtgtgtgtttcgccgaggtcaagccgagcaccgcctactacggctggccgatgcgcaatatcttcatgcagcagttgcttgaaggcaccctgcgcgaaaacctggggcagcgtacctgtgtggagttgcgccagggccatgaaatgctcgaactggagcaggacggcgagggtgtgaccctgcaggtgcgcaatgcccagggcgaggtctatgagctgcgcgccgactatgtgatcggcgccgatggcgggcgctccaccgtacgcaaaaaggtcggcgttgaattgctggggctgacccatccgcgcaaatgggtggtggtcgacaccgccaatgacaccctggatgcaccctataccgcactgcatgccgacccgcagcgcccgttcgtgtgcatctacctgccttaccagcagcggcgttgggagttcatgctgatggaaggcgaagatgaggcgaagatgtgcgaagaaagcaccatccgtgacctgatccgtgggcatatcggcgacgccgtcgaccagttgaacatcatccgcatccgcgcctacacccaccactcccgggtagcggcacgctttgtccaagggcgtgtggcgctggtgggggatgccgcacatatctcgccaccctgggccgggcagggcctcaattcaggtttgcgcgacgtggccaacgtggtctggaaactcgcggcaatcatccaggggcgtgcgtcccatgggattctcgcaagctacgaccaggagcgccgtgggcatgccaccgagctggtggccctggccgacaatatgggcaccgtattgggcttgaccaacccgttgatggccggcgtgcgcgactggttgttccaggcagtgaacagcgtcgacaacctgcgctcgcacctgctggagttcaagttcaaacccaaggccaccatcgccaaaggcctggtctatcacgaacgtgccgaactgcgtgaggacgacctggtcggccagctgtttgtgcagccctatatcgaagacgccaagggtcagcgtcggcgcctggatgacgtgttggggcattcctatgcggtgctgggttaccgggtcaacccgcgcgagcaactcagtgaaaagatggcgacattctgggcgcgctgggacacacgcttcatccaggtcaatcgttcgcgcagcggcttgggccgtcaccagccgttgacggcgatggacgccatcagcgtggaggacgtggataatcgcctcggcgaatggttctccaaggtgcgcgattgcatcgtcgtggtgcgcccggaccggtttgtcgcggccattaccacgcccgagcggctggaaagtgtgttgcgcaagttggcggagcaactgtcatgagcgctgacaaccccgtgttgaaccagttgcaccacgccacgcgcacggtgcaggccatcgcgccgctggcatctgacgcgctggacctgcactcagggtacgcgctgcaacgccaggcgctggacctgcgcctggcggcgggcgaacatctgagcggctggaagatcgccttcgccggcagcgccgcgcaaaggcgtttcggcctggaggagcccgtgtatggcggcctgactgaccgcatgcgtgtgctgccgaacacggcagtggcgctttcgcggttgatccagcccaagctggagatcgaagtggcaatcgtgctgggccgcagcctcgcaccgggtgactaccgtgatgaggagatcctggcggccattgcagaggtggcgccggcgttcgagattgccgattgccgttggcagggctggacgttcggggcgggggcttttcttgccgataacgcggcggcggggctgtattgcctcgggccgttgatggctttcgatcccattgcgcatgccaacgtcgcctatcgcctggaaagtgctggcgcgcttcgcggcgaaggcaacaccgagggccgggaggatccaccactggccaacctgtgctggctgattcgccgtctgttggctgacggccaaccggtggaggccgggcaagtggtgctgtccggtgcgctcttggcgccgatggatatccagcccgctacgtaccgcttgcatatgtttggcacggaactggctttgcttttcacggcggacaccgctcctgtgtgaacgccagctgccgtcatggatgacttgagtccccttcaggccgataacaacaacggggcacctaggaacgacgaccatgcttgctgaagttcgaaccttcaatgaccctcaattgcacgccggttccatccagggctggcggcaggtctatgaccagttgggccgtggctgcctgaccagcgagctatggcaattgtccgccgaccgctttcagatcttccaggaagtgttggacaaacgcgtggtgcagcgcggctatgcgcccaaagaccggctgtgcgcggccatgtcattgggcagtgcgcctgtggtgcagggtcagcaagtgggggcgcacagcgtcgtgctgttgcgcgatggcgaggagtttgtactgcatgcgcctgaaggtacgcacttcttcgccctcaacgtcgatacggtacgcttcgccaaactggccgccttcgagttgtccggcgatcagctcaagcgcctcaccacccgctcccaactctgtgtggatgacgcgttactgttgcgcatacgccagcggatctacccgctgtttcgtcaccttttgcaacaaaccgatgcgatcagcgcaaccgccgagaaaatgcttgaggacgaactgctcaacgcgttcctcgatttgttcagcaacgccaccgacgaggtgcgttgccgtcgcggcaattttgccgtgagtgcttacctggtcaagcgttgccaggagttgatcgatgccagtggcgataccccactgagtattctcgatctgtgtgaacacctgcgcgtcagccggcggaccctgcagaacagcttccaggcggtgaccggcatgcgtccggtggagtacctgcgaaacctgcgtctgaatgcggtgcgtcgacgcctgatcgccaccccggcctgcacccagaacgtcggcgaggtggcggtggcgatgggcttcttccacctgagccactttgcagcgcattaccgggcgctgtttggcgagtcgccgtctgaaacacgtcgagcgatggtctgagtctccggggttcaggcgacggggttgcccataccctccacaggtaagccttcctccagacagttgtccgggcgctcatgcaatcgctggttgcaccacgcgaagcctggcaccaccaccctgcacagcgccagtggcacaagacacgccaggccgacccgcggcctgatcgccacgtgggtacgtgtctctcgaagaaatcaacgagctttgatggaggaaccctggagacccggggtttatctgtgtagctcgcgatcaggcgtagctgatcctgtcggtgtaggcgttttgcagcattttgcgttggtagtcgcagggtgtggtactgaccagttttttgaagtcgcgcaggaagtgggattgatcggaaaagcccaggtccagggccagctgcgaaaacgaaacatcctgctgggtattgagggtgtccagggccgcctggcagcggatgatccggcaaaacgtcttgggtgacatgccggtgtcctgattgaactggcggtgcaaggtacggctggtatagccactgagatcttcgagttgctggatgcgaatatcgccgcgatggcgcagcgcctgctgaatgatcatggcggtgagtcccgatgtcttgcccatcaggcgtggggccaggtagtcgttgaacagccgcatctggtcgcccagcagcggtgcctggacgatgctttcgaagatgcgatgggcgaaccccgagacctccagcaggtcgagttcccgctcggtcagctcttcggccagcacattgatgaagccgggaatgacacccggtgaaaagcgcacgccgaagtagtgatggtgctgatgcaaatggacggcttgggcggtcagcggtgtgccacagatcctggcgctgggtcgagtggcatcgcagtcgaaaacgatgtccacgcagccatccggcacggccagcaggtcgctcgattgggcgacgtcgaaggcatagaaatgcgagatcgccgggtgcgcggagggcatcaccgaatagcgtgaagaattgagcacgaaccaaggctgttcgttcgcggtgtggtgccggggagtcggcacattcggtttgatcatggttgcaccttgggtaggcagcgctgcgggaaaaatcacgcattaatcgcgccaactgacgctgcgccggcctgagggcatgtccgaaatttacaataccgtcgacaacgtccgcccgatactcgacctcgacagcgtggagctgcgcctaccgcagcgatgtcaccttcagcgcgagaataactatgtctacaaatacaaaaatcgacttcatctacctctccgagcaggacatgatccgcgcgggggtgaccgacatgctggcctgcgtgaataccatggaagagatgttcggcctgctgtacgccggtgactaccgcatggccggcccgaacaacgactcccatggggcgatggtggtttttccgcaggattcgccgttcccgaatatgcccaagcccacggctgatcgacgcatgatggccatgccggcctacctgggcggcagcttttgcaccgccggcgtgaagtggtacggctccaatatcgccaaccgcgaaaagggcctgccgcgctccatcctgatgttcaccctgaatgaccccgacactggcgcgccgttggcgcatatgtcggccaacctgctgtctgcctaccgcaccggtgcgattcccggtgtaggcgcgcgccacctggcccgcaaagactcgaaagtcgtcggtctgcttggccccggtgtcatgggcaagaccacgctggcggcatttatcgcggtgtgtccgcacatcgacacactgaagatcaagggccgtggccagaagagcctcgacaattttatcgcgtgggtcacagcgacttatccgcagatcaccacgattgaggtggtcgacacccttgaggcagtcgtccgcgattcggaccttgttacttattgtagctccggtgaggtgggcgacccctcgatctacccaattgtgcgacgtgaatgggtcaagccaggcgccttcctcgcgatgccggcgtcctgctcgctcgacgcgggtatggaacagcccgacgtgcgcaaggtgctggacaacactggtctctaccaggcctggtttgaagagttacccaagcctgcgcatcacaccgtgcccgtcattggcgtgcgcttcatggacatgattgccgaaggcaagatgcagctcgatgacgtcgaggacatcggcaagatcatcgccggtgccgcgccagggcgtagaagcgatgatgaaatcatcatcatgtcggtgggcggtatgcccgtggaggacgtggcctggggcacggtgatttaccgcaacgcgatcaagcaaggcatcggtgtgaccttgaacctgtgggaaaccccggaactgcgctgagccaccccaacactttcctttgcgaggcattcgacatgacaaaaatcatcaagctcaagaccggttcgccgtttgaagatcaggccagctattcgcgcctggtggtcgtggataactggatctacgtgtccaacacggcgggccgcaacccgcagaccaagctgattccggaagacgtccttgagcagacgcaccaggtcttcgccaatatcgagtcggccctcaaggccgtcgatgcgagcctggccgatgtggtgtgttcgcgggtgttcatccaggaccccaaggacgtgcccgcggtcatgggcctgatcggcgaaaagtttcgcggcgtcgacccggcgagcaccgtcacctgtccacccctgggctcgacggtctacaaggtggagctggaagtgaccgcgtatcgcaacgcgtcgaaggcgcaggtcgaagtcattcgcctgtcgcaatgatcgtcaagcggccaggcgcaggcgtggccgcccttattcgcttaccgagtcttgaccatggcaccgacaatagcgcccgtgacaacctccaccgtatttcccagcgccacgtccgtcgtcatcattggtggcgggatcatcggcctgacggctgcgctgaccctggctgagcgcaacatcgcggtggtggtcctggaaaaaggccgtatcgccgccgagcagtcatcacgcaacctgggctgggtacgcaagaccagccgccacgccgccgacatcccgctggcgcttgcggctgaccggctgtgggcacaaatgcccgagcgggtcggggcggatgtcgggtatcgccaggaaggcattatgtttctgggccgcacacctgcgcagatggcgatgcacgaggggtggctcaagtcggtggagcatttgtcgctggattcgcggctgctcagcaagcgtgagattgacgcgatggtgccaggcggcgtgggtgattgggccggcggcatcttcaccgcgtccgacgcgcgtgccgaaccgacgctggccagcagtgcgattgccaaggcggccatggccatgggcgtggtgattatcgagcaatgcgcggtgcgcacgctgcagatgtctgccggcgcagtcagtggcgtggtcacggaaaaaggcgaaatcagctgcgaccatgtgttgctggcgggggggatgtggtcacggcgttttctgggcaacctcggtgtgtcattgccgaccttgcccttgacctgctcggtgctgcgcacccaccccatggaggggccgacgcagatcgctgtcggtgcgcctgatttttcctttcgcaagcacaaggacggcggtttcatcattacccagcgcggtaagttggacgccttcctgaccctcgatcacttgttgctcgccaagcaatatatgccgcagttccgtgcgcaacgcagcgtcttgaacgtgtcgctgggcaagccatttatcaatgacctggcactggctcggcggtggggcgccgatagcgtcagcccgttcgagcgtgtcagggtgcaggatccagccgccaacccgcggctcaataacgacgcgatgaacaacctcatggcggcctggcctgtgtttgagcaggcgcggatcgcccaggcctgggctggcactatcgacgtgacacccgattccaacccggtcatcggcccggtcgcgcagattccggggctgaccgtggccaccggcttctcggggcatggcttcggcacgtcgccagcggcgggccatctcgcggcggacctggtcagtgggcatacgccgatcattgacccaagcccttatcgcttcgatcgtttctaaaggagcatgcccatgcctgccgacagctgttttttcactaaccgtgccggcctgcgcctgcacttcttgcgctggggcgattcgagcggcgtgcccctggtgctgttgcacggcttgcgggcctatgcacagacctgggagtcgctggtgcaagccttgggcgcgggctactgcatttacgctctggatcagcgtggccgggggttgagtgactgggctgcgcccgccagctaccacactcaatcgtatgtcgaagacctcgaagatttggtcgcccacgtgggcctgcagcgatttgtgttgctcgggcactcattgggcggcgccaacgcccttgaatatgcgcggcaacacccgggccgtttgctcggtttgctgattgaagacatcggccccggctcttcaagccagggcgatggcgccgcgcgtattcgtcgcgagatgggccagacaccgttgcagttcgagagctgggaggtggcccgcgcattctggcaggctgcgcgtccgggcttgtcgcaagagggcctggcatcgaggctcgcgcattcgatgcaagagcgcgacggcgcgatcacctggcgtcacgatcagcaggggattgccgaggcgcgcctgagcatcgaaccgacggatttgtggccggcggtgcgcgcactggattgcccgagcctgttcattcgcggcgcacgctcggatttcctgccgcctgcgacactgcacgcaatgactgcctgcaatccgcaggtgcgcacggtggaggtcgccgacgccagtcactatgtgcacgacgatcaaggggcggtgttcaatgccctggtggcggagtttcttgaaagccttgcgcgcccggaatgaagcccacagcccgcatgattgcgttattggcctcgctgacggcctttgtgccgttttccattgatacctacttgcccagcctgccgcagattgccgttgagctgtcgagcagcacggcgcgagtgcaacacacgatcagcgcgttcctcgccggcttatgcctgggcatgttgttctacggcccgctgtcggaccgctatggacgtcgcgcgttattgttgggcagcctcacgctgtatggcctggcaactttggggtgcctgtttgccgcaagcatcgatcaactgatcgcctggcgctttatccaggcgctgggcggggccggcgcaatggtgctggccaggaccgtggccagggatttgttcggtctggcgcaggccgccaaagtgttgtcctggatgcaaatgctgacaatgatggcgacgttggttgcgcccatggtcggcacctggctggtgctggtcgacggttggcgcaccatattcgccgtgttgttcatcctgtgcgggttttgtctgctgatggtcggtgtggggttggacgaaagcctgccgccgctggcgcgcggccactcgctcaaggccgcctttgcggcctacccgggtattctccgccagcctcgggcggtcgcgttgatcctgtgcatgtccctcacgtttggcggcgtgttcgcctttatcaccgcctcaccctttgtgtacgtggagtacttcggtgtctcgccgcgcctgttcagtgcgctgtttggcctgaacattctgggcatcatcgtcgtgagctttatcaatgcccgctgggtcacgcgcctggggccactgcgcatgctgggcgtaggaaccgcgctggcaggcatcgccgcaatagcgttgttggtggcgggttacacccaatggggcgggctgaccagcatcgtactgtgcctgatgctgtacatgggggtgacgggcttgctgggggccaactgcacggcgagcctgatgagcatgttcccgaggcaagcgggggcgagcgtcgccctcggggtctcgatgcagtttgcctgtggggcgctggcgagtctgtgggtcagtcgcctggcggatggcaccccatggcccatgtgcctggtggtgggctgttgcgggctgggctgcctggtggcgtatgccattgcgcggcgcgcgccgttcacgcctgtggttgtgcgggatgaacagcctgtgccgtttcaaccctgaggcggcgacaagcacgcggagactgctggtaatttgcttgagcttgccagccacttggagatgcctgacagcacagggtgaatcctcgcgctaaggctctcccagattattgaacaccgtttccagcatgcggttgaggcgctggatctgggcttcggtcatgccactgaaactgcgcttgaacacgtcgccggtggcggcctggatgcgttcgatggcggcccggccctcggccgtgatgcgtacctgggtaacccgtccatcgtcctcgcagggcgcggtgtcgaccaggccatcgtccttcatgcggtacaccgttttggtgatggtcgacagcttggcgatggcgtgggtggagatctcggaaatactggattggccgttttccttgaggatgaacagcacgcgccagcgggggatatccaggccgatttttttcagggatttttccatgtattggctatagcggccatgcaccatcgccagccagtagaacggaaaatcttctttgtgaaagtcttcactgccggggtcgtagcgactggcgtgtgttttcggagacgtcatggtcagctcatgtcggaagaggcaagcaatcatagacttttctcgtgaattcggcacggttatcaccggctgaaacgcaagccatgacgtcggggcacgtgaatggatttaattgacaattcacgtaatagtcagggagtgtgaaaaaagacagccggcgtttcaggcttcgttcactgagttttacagcgaaggaaaacgtgacatgaccatcgtgattgaacagctttctcttggcggcaacgggtttagcgtgatggtgaaagacaccatcgatgtcgccggcagggtgactcgggcgtcgagtcaggcgcttgatgacgcggcacccgccgacacccatgccgatgtggtgcaggccctgttggacaagggctgtcacttggtgggcaagaccagtctgcatgaactggcgttcggcaccaccggtatcaaccattggacgggtacggcgccgaacccgcgttttcctgggcgtatccctggggggtcttccagcggttcggcagcggccgtggccgctgggttggcggactttaccctcggcaccgataccggtggttcggtgcgtgtcccggcgtgttgttgtggggtgttcggcttcaaaccgacgttcggccgtgtcagccgtcgaggcgtgatgcctgcgcaaagcagtctcgattgtgtcgggccatttgcggccagcctgccgatgctgatcaaggccatgcaggtcattgaccccaccttccatccggtgcctctgcagcagccaccacggctcggcatcctggcggtccaggcaagtgctgcggtgcaacgtgtgatcgatgccgccgtggcagacagtggtttgccgactcaacccgtgaccctgccgagcctcgatgcggcctatgctgccggcatggtggtcatcaatcgtgaaacgttcgacgcctgtgggcacttgttggcgaccggtctggtgggggccgatatcgccagtcgcctggccgctgccggcaccaccacggcacagggcctggtgcatgccgaagaggtgcgcgaacagttcacggccgaagtcgacgcggcgttgcgtcaagtcgacgtactggcgttgccgaccatgccggatttcccgttgaggctcgccgatgccgccgacacgcaagccgtcctgggcatgacccggttggtgcggcccttcaatctgagcgggcacccggcgttgagcattcccctgggcagcgccgagggcctgccggttgggttgcaactggtgggggtgaaaggcgcggacgaacaactgctggctatcgccggccacctgctcgaatgcctgtattccaaccataagggctgatcggctcaggaggtgaacatgcatgaaccacacgctttggcaacgcttgaaagacgcttgcgccggttcgaaacccaagacagcgtgcgtgcctgcatgaaccgctacatggtgttgtgtgacgggttggatgcgcactcgccgttgccagagttggccggcctgttcacccaggacgcggtgtgggagggcaagggcgccaaatacgccaagagtttcggcggctatcgcgggcgtgaggccattgccgcgatgttctcgggctacatgaagtcacccgcgcactttgccctcaatgtgcattttctgaccagtgagctgatcgaggtgcacgatgatcacgtcatgggcagttgggtgatgttgcagacgtcgacatttgccagtggcgcctcccacctcaatgccgctcggctgacggtacggtttgccttggaggagggcgtgtggcgcatggcgcacttccagaccgaaaacctgttcgggcgccctgtgcaggcctggaacagcgaagacgacctgccggtgccccaggctggcgtcgaatgatcgccttgcatcgctgacaccgctcacgtccttttgtcattacccgcccccggtctgccgggggcgtggcgttgccgtgcgcgcagtttatggttggtctattaattttgtgaaaaaaaatattttttccaaagacttctggtttctttatggagagatcagatgctaacaagtccttatataacaataatttgaaaaattaattgagtgtcatttttggaatttaaggcgttttaagcaaaaatattgcgtgaatattcaattgactcttcacgtaaatccgcgcagatttatggcaacggcacccacaaaaataaaggtaaccctatgccgatctatcccgtttgccttgcttgcgtagcgccccttcgcgtcgaaggcacatccgccgcgcccagactccccctccgagatgcccggtttttccggcactgaatcctgcccaagcccataccgttcctgacgacggagtaactatatgcatgcgctaattgcctcagcgaccggggtcgcgagttcgcttgtcggaggtgccgatttcgaggtgttgcttgacgacattcgtgagcgtgcccgatccggtgagttcgaccgccagcggcacatctcacgggacgtgatcgagtccttcaagcagcacggcgtgtaccgggccctggtgcccaaacgctttggcgggctggaatgctcacccgccgaattctgccgggtcatcgaacgtatctcccaggccgatgggtccgccggttgggtcgcgagcttcggcatgagcccggtctacctcgcggcgttacccctcgagagcattgcccaggtgtacgccgatggccctgacctggtctttgccggcggtatcttcccgccgcagccggccgaagtggttgccggtggcttcatggtcaacggtcgctggaagtactccagtgggtcgctgggggcagatattgtcggcgtcggtatcgcacccaaagacggcgataccttcggtttgccgcgtattgccgtgatgccgcgcagcgccattcgcatcgaagaaacctgggataccgtcggcctgttgggaacgggcagtcatgacctggtggccgagcatgtgcgggtcgccgaagagtggaccttcgtgcgcggtggcctgcccaatctcgatgagccgttttttcgttacccgtcactgtcattcgccacccaagtgctctcggtggtcggcctgggtgttgcccgcgccgccctggatgcattgacggacatggcctgcggccgcgtatcggtcaccggcgcgccggcgattgccgatcggccactggctcaagtcgatatcgcccgggcggaagccgacctgcgggcagcccgtgcattcttctacgaatccatcgagcgcgcctgggagtacgtgctggcgggcgatgcagtgccggtggcagccaccaatctgctgcgcctgtcttccacccacgccacacgcgtggccgccgatgttgcccgtaccgcgcaaatgctctcgggcatgagtggtgtgttcaacgacagcccgttggcccgctgcgtcaacgatgcccaggtcgtgacccagcacgccttcatgggcgacatcacctatcagaacgccggagccatgttcttcggtaaacaacccttgcctggctacctctaaccgtcgagaccctgaaaatgaacgataaaaaaatgctccgcgtgctgttctgcatggggatcaaccagaatttcttcgatgcgcctcgtgacgagcaattgcaggtctgggcagccttcagcgcgatgtggaacggcattcacgacctggcgggcgtgcaggtgctcggcaatatggacgacgaccagagcatggtcggcccctccgacggttttccctggaccacttacctgctggccgatgtgccggacatcgataccgtacatgccgcctgcaacctgttccgtagcacgccggtcggcgatggcccgtacaaattgtggcgctacaccaaagtcgaagcccgggttgggcgcgagctgatcatccagcgcacttgatgccgaggaggccatcccatgaacaagctgattcctgccgtgaaccttgccgtcgatcctgccgacctggtgcagtccgatcgcgtgcacacctcgatgtacaccgatgcccagttgttcgacgccgagcttgaaaagattttctacagcacctggatctgggtcgcccatgaaagcgagatccccgacagcggtagctataaaaccacctacatcggcaagcagccggtgattgtggtgcgtgatcgcaagaaagacacccatgtgctgctcaatcgctgccgtcatcgtggcgccaccgtgtgtgaacacaaaaaaggcaagaccaacagtttcgtctgcccgtatcacggttgggggtatgcattggacggctcgctgcgcggcatcccgcatccggaaagctacgccgattgcatcgacaaggccgagctgccgctggtcagcctgcgtaccgaaagctacgccggtatgatcttcgccaccttcaaggatgacatccagccgctggaagactacctcggcgcggcgaagaaatggatggacctgttcatgaagcagggcgcgggatacgggatcaaggtccccggcgaacatcgcttccgttttccgggcaactggaagatccagctggaaaacaccaccgacgcctatcacttcccgctggtgcacaagagcttcctgtcgtcggtggacgagcagaccctggcgttgttcgacttcgtcaaaggccctggttatgtcgaggacttgggcaacgggcacagtgtgatggtgatgattccggacctgatcgacctggaagccgacctggacaatcccatccccgagcgctttgaagcactggccgcggagctgcgtgatgaaggcatcgaggagctgcaggtgcgccgcattgtgcgtgcggtgggcggcaccggtttcaacctcaatctgtttccgaacgtggcctgttcgatggcgtttttccgggtgttgcaaccgctctcggtgaccgagaccgagattcaccactcggtcatcaccatggacggcggcccggccgccgccaaccgctaccgcctgcgcctgcatgagcactttcaaggaccgatggggtttggcacgccggacgattccgaagcctgggagcgtgtgcagaagggcgcaagcgccggcgatgagctgtggatcatgctcaaccgcggcctgcccggcgagcgtgccagtgccgacggccgggtgtccgacgtaagtgccgaaacgggcatgcgcgcggcgtaccaacagtggaaaaagatgatgtcggcctgagccgtggagaaccttatgaatctgcaagtgctgcaagaagtcaccgccttcatctggcaggagggcgacatgctcgaccatggcgagtacgccgcctggttgaagatgtgggcgcccaagggcacctacatcatcccgatcaacccgacggaaaccgacttcgagaacacgctcaactatgcgtacgacgaccaccatatgcgtgagttgcgggtaaaacgcctgatcggtggcgagtcgatctccaccagcccgcagccgcgtacggtgcgcacgcaatcgcgctttcgggtgctgagtgacgacggggtgaacgtgacggtgcgctgcgcacagaacgtgcgtgagttccgcaaggagagcctgaaactctacagcgccgacctgacctacgagttggtgcgggctggaggtggctttgagattcaccgcaaagtggtgagccttatcaacagtgacgatgccctcgccggtatcggctacatcctttgaggcgcgccgacatgaaccagatcgcattggtgactggggcaggccagggcctgggccagcgtttttgcgccagcctgctgcgggccggctattcggtggtcattaccgatatcgagcaggcggccgcagaggcttgccaggcgcaattggaccccggtggcgcgcgcagcctggccctgcccttggacgccggccgcaaggatgacttcgagcgtgccctggccagtgtgctggaacgcttcggtgcgctgcatgtggtggtcaacaacgctgcggtgaccaagaccacgccgttgatgcaaatcagccccgaggagtttgacgccgtggtgggcctgaacctgcgcagcgtattcctggggtgccaggtgctgggcggacacatggctgacgccggttacggacgactcatcaacatggcgtccctggcagggcagaacggcggcaccgcgacgggcgcgcattacgccgccagcaagggcgcgatcatcacgctgaccaaggtattcgccaaagagtttgcctcgcgcggggtgacagtcaacgccatcgcgcctggccccatcgactccgccgccgtgcatgcggctgtgccgcctgagcgcctgccgggcctgctggcaaatatcccggtgcagcgtctgggcgatgcggattttctgggtgacctgatcgtgcagttggcgcggcccgaagcctatttcaccaccggggccacctgggacgtgaatggcggcctgttcatgcgctgactattaccgggtcgccacggcgaccttcacgaactccatggaatcatggccatgactgaacaactgttggatgtagtcgtgcacaagcgcgagctgcaaggggacggcgttgtcgtcctggatttgacccgtcgtgacggtgcaccgctgccgttgttcgaagccggtgcacatgtcgacattcacataaagccgggcctggtgcgccagtactcgctgtgcagcgaccccgccgatcagagcgtctatcggctgggcgtgctcaaggacccagcctctcgcggcgggtcgctcggtgtgcacgatacgttgcaggaaggttgcgagttgcagatcagcgcaccacgcaatctgtttccgctggccggcgatgcgcggcgctcgatcctgctgggcggcggtatcggcatcacgccgatgattgccatggcttacacgctgcaggcatccggtcacgccttcgaactgcattactgcgggcgtgagcgcggccgcagtgcgtttttggcagagctggcggattcgccgtttgccgccaaggtgttcacccatttcgatgatgaagggcttgaacagcggctggacctggcccacgtgttggggtcgggcgaggccggggtgcacctctacacctgcgggcccgctggcttcatggagtgggtgatgcaaggtgcgcgtgagcagggttataccgaggagcacatccacaaggagtatttccaggtagaggtggacagttccggcgccagctttgaagtggtggccgcgcgtagcggcaagaccgtccaggtggcagaagggcaaagcatcctcgccgcactggcgcaagtggggatcaagatcgagatttcctgcgagcagggcgtgtgtggaacctgcctgtgcgatgtgcttgaaggtgagccggaccatcgcgacgtctacctcacggatgacgagaaagccggcaatgaccaaatcctggtgtgttgctctcgcgccaaatcaaaaagactcgtgctggatatctaaggggaacgacatggtagacgtaagcagttttcgtaatgcaatggccatgctcggcggcgccgtgacggtcatcaccaccgatggcgtggcgggtcggtttgggttcaccgcgtcagcggtgtgcagcgtgaccgactcaccgcccacgctgttggtatgcatgaaccgatcgtcccattccaacgagcacttcaagcgcaatggcgcggtgtgcgtcaacattctgtgtggtgatcatcaagaaatgtccggggcattcgcgaaccgtgcgttgacgatggatgaacgctttgccgtgacacagtggaccaccctggaaagcggcgcgccggtgatgaccgatgcgctggtcaatttcgactgccgtattgcccaggtccatgaagtcggatcccacagcattttctactgtgaggtccagaccatccgtcagggaaatgccgacgaggggctggtgtatttcaaccgtgcttatcaccgcctgggcgaggcgtccaaagcctgctgagcccggcccgttgcgccggctgccgatagcgtgccggtgtgtggcgatatgagcacattgtgtttttcaaggtatgcggcgtgtttctagaatgtcgccttagttgtttcgtgaaagcgctgaagtgcttccgtgccgtcggtcgccagtgcaagaacgggcagggttagagcaaaggcgatcattaaatgcgagggcagtttcatactgtttacccacgttgcgcgcacaacaaggcgctaaattaaattcagttgaaatgtaggtcagggctgattcgggaatatagggtatcggtacgggaatcaaccgttgtcataggttgtactcgcactttttgacctgtgttcagccgatgttcagcgttgttaagcttgaataaacaagttgcacggcctttacaactcttcacttttccaatctggatcgcctgaaaagcaaagtgctagtctgcgcttttttagagacggcagggacgcatgaataagctaacggaagtggctgtaaaaaagccctgttcatttatttttgtcgttgcgtttattgtattggctgtcctgcaatacaagcccgccgtgctcaattacaccacgcgctttgtcgactttgcccaatacatgcttgcgcacggcgtcacgctgtttccaatcgctgaagatctgcagccttatcccgattacaccgtgatcaatacactcctggtgtatctggtgtccctgccgtttggccgtgtgtccattctgtcgatgggcgtgcctttttgcgtcgctgccgccctgatgttggtgttcatatacaagttgggtgcgttgcatgagaagaaatggggcgcctacgcggtggtgtttgcactgttcacctggtcatttctagacggcgtgaactccctggcgctggatgtgtacccggcacttttcacggtgatgtgcttttacctggcctacgcgggcgaggtgcataaacagcgttatcggttgctgctggtgctcgccggcctggcactgggctttgcgtttcgtggcccgatcggcctgatcggacctgccagtgtggttgcctcttattacctgttgagccggcagtggcgcatgctggtggtgttctcgttgttggctggcgtggtcctggccacgggtatcgcgctgctgacttgggcggcctacgtgcagggcggcgatgcttttctgcaagaggtgttgatcatgcaaggactggggcggttcggcagtgatcacgcgccccgttattacttctacttttcggcaggcttgctgacctacggtgtcaccgcaatcattgcggtgagtgtgatcatcaagcagggcaaacactttttcgaccgaacgccgcatcccgtcacgagcatgctcctgtacctcaccggttggctcctagtgatcattgtgctgttcacgattccaagttcaaaaaaggcgcgttacatactgtcgatcaccccggctatttcgttgttggcggcctacgtcttcgtggatcgcagtgaagtgtttgcaaacacccggagaaaactgcttgggttctgcttggagttgccgctgataggcctcgtgatgctgttacttgcctatgggtacagcttgtatgcggtgaccccgctgcagcccaactacctcggcgcctgcctgggtttgattacgcttgtggccgtgcggccctggttggaatcacgctttcacgagcatccccatcgtgagttcgtcgtcttttctttcggggctgtcacctttctcatactggatatgtttttcttcaactccgttacttaccatctggagttggcccatgagccgacgcctaaattcctgccttattggttctggtgaacagtgagtctgcaaaaaaaacacgcggtgtttgcaggtgcaggcatctgcgcgatgctgctgggattggcggtgttcgtcctgcaaaacctgtccgatatggagttgacggacgctcgggtttcgacgctgacgtttcgctctggcgacgcacagttggtcgggacgctggtcttgccattgcatgtccaggcgccgcccgtggcgctgatcattcatggggatggtcccatggaccgcttcgcagcccacggctacttcccgctgatcaacagtttgctcgacgctggaatcggcgtgtttacctgggacaaacaggggatcggcgagagcacaggccattggctcagccagtcgatggcggaccgtgccacggaagcggtggccgcgctcgcccaggtgcgcaagcaggagggggttgcaccggacaaggtcgggtttctgggtttttcccaaggcggctgggtcattccgcgtgccgccagtggaggcgacccaggcttttcagtgattatcggcggggccgtgagctggcgccggcaaggcatgtactacacgcaggtacgattggccgaggaaggccgttcccaggatgagatcgacgccatcgtcaaagagcaatacgagaggaacgacaaggttttcggcacagcgaatcaagcctacagcccccacctgtttcccggtatggaccgcgctcatttcaacttcgtccagaaaaactacaacgaagacgttactgccgcagtgaaaaccatgaagggcccggtgctggcggtctggggcgaccaggacctgaatgtcaatacggccgaggactcaagcgtctaccggaagatgtttgctggcacccggggtaggcacgttgtggtcatccccaacgccacccacagtttgttgagggccggcctgttcaatgatcaattggtatcgcaatggccggcatggaaagagtacgcgttcatggcactggggcgtcacgcctatgtgccgggttccctggaactgataagtcgctgggtcaagtcctcaacgtcggggaagtgaatcgctctgcgctttaaacatcggcaaccgcttgagcatccacgtcaacagttcctgggcgggcgccgccaatggtcttgaggccttcaccaacagcttggcctccacccccagcaacagcggatggtcgatcagcaccgacgccagctcgccgttttcaatttcccggtaggccgcgaactccccggccagcgaggcaaagccgccagtcgcgaccaggcgcttgagtgccgccagggagttgctgaccagggtcgggcgtacttcgatcttctcggcgtactccagcagggtgatggcatggccgataccaaacgtggtcggcgtcagcaccaatgggcattccaatacctcggtcaccgtcgccatggtgcctcgcaccgccagcggatggtccgggcgcaccagcaacatcaccggctgcagcgaggcggcgcggtagtcgatgtgtggatggggcggcgggttgtaggccaggccgatatgcgcgcggttttcggcaacttcgttgagcacatcgtccaccggcaggatgtccagggtgatttcaagcctggggtattgcttgctgaaaggcgcgagcacgttgtcgaccagcgcatccacataaccttcgctgatcaccacccgcacatggccttgttgcaggcccttgatcgcttgcaattggtcttcgagtttttcctggtgcgagcgatagccgcgccagaactccagcagatgcgccgccgcctcggtgggctgaacgccacgggcctggcgctcgaacagcttggcgcccagttcttcttccaacagcttgatctggcgggtgatcaccgagggcgaggtgttgatgctgtctgccgcccccctgatcgaaccgtgcaccagcacttcgtggaagtagcgaagacgttgttgattgatctcacgcatgaaggatgatccgccttggaagttgtgttgtctacaaagcaacgctaagtgaacttagttgctcttgctgccgatggtgggccggcgcaccctgaattggcaagcacgcagacccacaaaaacaattggagactcgtatgccaacctcccgggcgccggcagaacattcagccatttctgccctctaccacaagctcaactggcggctgctgccgctgttgttcatcggctatgtctttgcgtacctggaccgcatcaacgtggggtttgccaagctgcagatgcaaagtgacctgggcttgtccgatgccgcctacggcgccggcgcggggattttcttcattggctatgtgctgttcgaactgcccagcaccctgatgctgccccgcatcggggcgcgtaaaaccttcagccgaatccttgtgctgtggggtatcacctcggcgtgcatgttgttcgtgcgcgatgtaccgacgttctatgcgatgcgttttttgctcggcgtgttcgaggccgggtttgccccaggcatgatctattacctgtcgcgctggtacggcccgaaccgcatggcgcgggcgattgccattgtgtttatcgccggccccatgggcggcattctgggcggacccttgtcggcctggctgatcaccacgcttgccggtgtcggcggtctggccggctggcaatggatgtttttgattgaaggcttgccctgtgtattgctcggcgtgctcatgtactgcgtgctgtccgaccggcccgccgatgcgccttggctgaatgaggcggaaaagcaactgttggaaaccgaactgggcacggcgaatgcgcgcagccattcattccgtgcggtactgcgcgaccctaagctgtatgtcctggcctcggcatacttctgcatcatcttctcgatctacgccatgagtttctggctgccggcgatcatcaagaccctgggcctgcaagacacccagcaagtgggctggtatgccgccatgccctatgtcggggcggcactgggcatgtactggatcgggcgccgctcggaccgcctgggcgagcgccggctgcactgtgccgtcccggcggccatcggcgcgcttttgctgatgctctaccccttggcgggtggccacctggtggggtcgatgaccttactgacgctgtcgatcagcatgatgttcatggcctacaccgtgttgtgggcgatgccctccgagcacatcaagggcgatgcggccgcaggcggcattgccttgatcaacaccatcgggctgtccggtggtttctggggcccggccatgatcggctgggccaaaaccgccaccggcagcttgaacacgggggtcgtagccgtgggctgcgtgttcctgtgcgcggcgttcgtgatcattgcgaccaaaccgcgaacgcgcaccggcgcggcgggcgagtacagcgcgggttgagtggcccgccatcattgaaaaccatgaggaacccaagatgcttctatacctgtcgacatgggccgagatcggccactttctcgagcgcagccgcaccatcgtcatccccatcggctccaacgaacagcacgggccgaccgggctgctcggcaccgactggatgtgccccgagatcattgcgtgccaggcgcaaaaaaacgccgatatcctgatcgcgccgaccttcaacatcggcatggcccagcaccatatcggcttccccggtacgatctcattgcggccctcgacgttcattgccgcgatcagcgattgggtgcattcgctggcagcccatggttttgaaaagatcctgtttctcaatggccatggcggcaacgtcgcctccattgaagcggcgttttccgagctgtatgccgaagccagctttgcccgtcgccctgcggggttcgccctgaagttatgcaactggtgggacctcgacggggtgggcgaactggccaaggagcagttccccaccggccacggtatccatgccacgccgtccgaaatcgccgtgacccaatgggcctacccggactcgatcaaaaccgccgattactcaccccagatcgcgccgtgggggccgattcgcgaagccttcgacttccgcgcccgccacatcgatgggcgcatgggctcggacccggcgcaggcctccccggagaaagggcgagacctggtgatgatggcggcacagggcctgatacgcgaagtcgaggcgttcaacggcgagccgatcccgggctaagagccagccctttcaaggcctttaggtagaacaggcggtaataccctgtggcgagcgggcttgtcccgcgttgggctgcgaagcagccctgaaacccccggccgaagagtgcctgattcaccgcattcctccatctagggtcgcttcgcaacccaacgcgggacaagcccgctcgccacagttgcagtgtccgcccttattggtatggtatcagccagattgggtcggtttttcaaagaccttgaaagggctggggctaagagcactttcacgccaatccgggcgctgagccgtcaacgctcatgtttagcgcgtggtggtgccaggaagccccagtgcgctcagcttttcacgtacgtgaatcagcttttcctggttcgtacggatgaacgctgagcgctcatcaacggcggctacgatcttttcaaacgtcttgagctgtggcgcaaagaagtcgagcagtttttcgtcatcgccgatcaggtcgtagatgtccttgaaggaactcttgatgaccgtggtaatggactctttggcggttttgagttcctgttcgagttcgtgagccttgtaggcactcaggaggtctgaggtcagggtgaaggctgcaccggcaggaccggcccatttggaaatggccccggcgattttggttgcctgccacggcttgaatttgatgacgacgccggttaccgagcccagcacatcgcgcgcggcaaacactgcacccttgatgatgtccgggctcaggttggcgatgcctttcgccgcgccgcccatggacttgagtgcgccttcgctcatggcattgaggaagctctcacttgagtcgagctgacgcccgatgtcctgggaaatgcggctggtgaccttggacgattgatcgaacgaccggtcgatggcgctcttgatcctcaggttgagcttatagccgacaccttcttcggtgtagccgatttcgtcctcgagaaagtcacggatgttctccagtgacaaagggcggagcttgcccagcaattcgttttcgatatttcgcagctcctcgaacaactccccggcaagacgtttgacgtcgcggcggcccttggaaatgtcctgtttgatccgttcggactcctcggcgttctgttgtgcgaacgcatccagtctgcccaattgctcttcagcctgggccacatgctggccgacgacatcgcggaccacgtccatgccggtcttggccatcaggaccgcgggtacgttgtcctgcagaatgcgagtggtcatggctttcaggtcgttgatccgcgagcggctttcataatgctcgggtttgctgaaccagaattccaggccgcggccaccggggttagaggccaggcagacgatattcaaacgtgccagttcttccgaggtcaggttagcggcccgctgcagcttggctttcaagttgtcttttttgatggcggcttgatcgtcgaacagcgcctgttcggtcaagtcagtcacttcatccattttattgatgacgaagaccgtcgaagacagtttgttcaagtcgcgcagtacccacttggcgatagcactgtggctatccttgagcggattggtggcgtccacgacgtacaagatcagatgcgcttcggagatgtaacgcttggtcaggtcttcataaaccacctgttggccatcgacagtcttttccttgtcgccaaagaggcctggggtatcgacgatctcgcatttgccgggcaggccttctggcgtgtaaatcgccaggcgatcggaggactcgtccatgtcgatcttcatgtcggccatgattttacccagccatgcagcgatcacgctggtcttgccgtcggagaaggcgcccagcagcgcaatacgtagaacgtcggactcgatcgcgttgacagcggaatcaatcttttccatttcggcattaacgtcggcgcctagctcgcccagctctttcaggatgaaccgaagctgatccagtcctttgatcgctgcctgtttatcaacattaaattgcgtgaattgttccatggggcattttctccagttgatctttagtgcgctgcatcagggccatctgctgcttgatgatgtgcagcgggcgaatcagggatgcatggatgtcgctgacttgtccgaggaccttctcttcgatttggctgcgaatcggtgcgagcaactccttgagttcatcacgcagggagtccacagccttggcgcgtgcctctgcgatcttttcctggacttgagcctgggctttgcggatgcgtttttcctcgctgagaaggaaattcatgaggttgatcaaaaagcccactgcggcgccgacggccgcgccaatcaggttgccgacaacaggaaacgcggtgccgatacctgctcctgcaagggcataagaaccaacgttgaacagcatccagccatagtctttaagatccaggccaaggcccagttcgggtgtcttgtagctggcattgaggtcttctgctacataagccacggcctgctcgaattcaacccgcgaaacatcctcgagcaagcgctgcatggcctgcacaaggtcaccctggagctctgccaggtacttttcgaactgggtctgcaagtcgtctttcagttgctcctgacgctcgcggaaggcgcgctggatcttggtggaaatcaaatcgttgttgccaaaatgttcctcaacgatgttgtcggcgcgggcactcaaatcgatgaagagtccgttccacaggttttttcggccatcctgcaaaaggcgttcgaacctgaccagcccatctttgatagccgcgcggcattttttgaattccggctctgtccgggcgatgaacatttcgtgctgcgtgtggagcgcttgcaggatggcgaggttttccaccagcaattcatgcactttggtcttgttgctttcgatcatgtcttctttgaacgtgcccagttttccgtgaagcacgcgggcgactgatttgatctggctgaactcatacatggctttcgacgaggcgaaatacttgcggtaattgcgctggtgaatgaccaggtcccgatcccgggacgggtggatgctcgtgcgttcggtccctggtgcaatggccagggatgaaaaggcgagcaagccctgcacgcaatgtccgggctgcatggccttggcgcccagcgcggactcaagtacaccgatggtttgctgcaatgcctttgtcgagtcgccatcgctttccagagacgcaggaacgccgtcgaattcgaattggtcagcgttaccgcgcacgttcaccaggggacacacttgggtgccgaggcgcaaataggcgcgaatcttctctgcagtggctttctcaggcttcttgttggtgccattgacgtagaacaccaggtgcgctttggctactgcttcgcggaccatatgagcgtactttccttcgtcaccctcaatgccgggcacatcgatcaactgaaagcgtttgcccttgtagttgagggtgtagaacgtattgcccttggtgaagtcctcttcgcctgtaccaatgatgcgaccgtctgtgcgcgaggccagcgcctttttccggctaaggaccaaggtcccggaatacacgctggccagccgctggttcaacacctcatccagggtggccgaggcggtcttgatgtgagtgaaggggcttgcgatggtcccctcattcgacagggtggtcgcttcatcgaacagttcgtcgagctcgaaattgctcatttcacgctcctgccagtttcaagagcgctgccgatgccgcagcccccagaaccagtccgccgcaggtaaaaacaatcaacttcgtcctgattctggcgttggattgttcatgggccagttgcagtcgttgcgccgcctcttcctgctgggccttcagctgttgggcggctattgcctgttcggcttcaagctgttgcgcggcggctgcttgctcattctttaatcgggcattggcctcttgctgcgcgagggcggttcgggccatggcctcggactcagcgatgcggtttctggacagggcctcttcctgcaaaatctcggaaagatgacgcgtcccctggcggatttcagtgatttgcgctgcatactccgcgtaaaccgcattcagcccttcgcgcaatccatcgatgtgttcagccagcgcctgttcatacttcaccaagtcgtgggcgttatgttccagcagcgcttgccgggactcttctttgaacagaatgcgcaatgattcgatgatcgtgctcttgcccgcattggtttcgccgaaaaacgccagggtgaacacgtcccactcggcatgggttttcaactggtcgagttcaccatcgaaacgaacctggatggcgcgaagcttctcggtcatgttgccaacttcgcgcttgccctctttgtgctcgacattcagttccagaatatcggccatggcgctggcgatactgtctgaaacgtcggagtacaggcggttaaggtcttggggcgcgttcattacagttccttgtgtgctggcgtctaagggatgaaggtgtaacgtcaggaggtgatgtgccgagtgtcacgcgagcccacggtgggaggggtgctgctcgttggtctggcacatgggtgaatcgcaggcagccgccatggccggttcagtccagcggcaatgaaacggtattaggcgtataggaggagtgcgtcgcgagatcggctcaaaaacagccgtggaataagttgcctgaggcattcacaacatccttgttggtgtgggacttcatgcttgcaaagcatgctccatagcactacatcggccctgcggatgaaagctttagtaggacagcctaaattgaaaccttgcgcgggacgcaaggcgacctttagtgtttgccatcaatcccatttttggaccaggcaaggaagtcagcatgacgcaattggcggctcagacagtctcatcggcgtgcgcagcattggttgaactggatacgcttcaaatacgatcctccgctggcaacctgagcccggctcaacacgcgtttgctgactatctggcgaacctctggtcaggtgctccaggtgctttcgagcatcgttatccgatcaccaggagtcgggtgtggaagccatggcggcaacaccctcagcgccagagcaacgactggtggtgtttgtccctggccgaggcagccaggcactactcctggccggaaaaaaaagcacctgatgacttcgccagtattgcagcgcgatttcgcaaggcgctcgttgagaaccagtgcgttgatgcgcgcgcggcctgcctggaaatattcaaatggggaggcgttggcaataggcccggtaatgcgtccgtgcggtgggtgcagacgcaggctgccgagaggactctgtgctgctctatccttcgtgcgatcgcactgcttggccctacgaacaaccagtcactggcggttttcgacggcacgaaactgctgatgaattccgcgatgaccaagatctacgctgctgcggctcctgagggcatcatcatctacgatggccgggtgggggccgcgctggggttgttggtgcgaaaatggctggatgggacagaggaatgtaaggttccgcaggatcttgcttttcgctggggccccaggcagaaaacggccaataacacagtcgaaacacgtgacccttcgcgagggagcttcacatttgacgatctttacaaaaaaagccgcgcagggcagccacatcaatccgaggtgtgggccgagcttgtgcgaaccacaagccgcatcctgtgtgaggtgattcggatactcaaggtacaggggcaggatacgacgctcctcagtctcgagcgtgcattgttcatggtgggttttgatgtgcgtcaatcgtcaaggctactcaaatagccgaacagattcgccgcctccggtgacagccgcgccggatccgccacgccgacatataaggtccgcgccacccattccccctccagcggtatcgcccgcagtttcgcttgcagcagttcgggatgcaccgaccccaacggcaggataccaatccccaatcccgcctcgatcatccggcagatcccatcaaagctgctgacctggatacgcaccttcaagcgcttgccggtgccggcggcggcatcgttgatgcgccgcagcagcgagctgccctggttcaaggcgacgtagtcaaagtcgagggtatcggccagggacacgcttgagcactgcgccagcgcatgcgtctgcggcaccagcaccaccaggcggtcgcgtcggtaggggcgcacgtgcaagccgggtgcgggcacgttgtcggcaaaaatgccgatctcggcctcgccgttttccacggcgtgaatcgtacggtcgctcagggcttcttccagttcgatacgcacgtgggggttggccgccagaaaggccgccaagtctgccggcaggaactggatcaccgccgaggtattggcaaacagccgcacatggccacgtacacccttggcgtaatcgtcggcgtcatgggccatctgctgggcgacgtcgagcattgtgcgcgcatgctcggccaggcctcgaccggccggcgtgagttgcaagccgcgggggacgcggttgaacagggtgcaatgggtcacccgttcgagttcggccaggcgcttgctcgcggcggaaacggtcatgtgcgcgccgttggccgcctgggtgaggttttgcgtgttggcggccagcaccagcaggcgcagcgacaccaggtccagttgcagcaggttgatcatatttacgccctgggtttccaatctggaaagagtagtggaaatctttgaaattctcacgacctgtctttggcgcgattatccgggcatcgcctccaacaacaacggacaacgtcatgagcctacccctggaaggcatcaaggtggtcgaaatgggccaactgattgccggacccttcgccgccaagatcctcgccgagttcggcgccgaagtgatcaagatcgaaccgccaatcaccggtgaccccctgcgcaaatggcgcctgctgcacgacggcacgtcggtgtggtgggccgcccagtcgcgcaacaagcaatcggtcaccctcgacctgcgccagggcgaagcccgtgaagtggtcatgcggctggtcaaggacgccgacatcctgatcgagaacttccgccccggcacccttgaaaaatggggcctgggctgggatgcactgtcggcgatcaaccccggcctggtcatgctgcgggtctccggctacggccagaccgggccgtatcgcgacctgccgggctttggggtgatcggcgaggccatgggcggtttgcgccatctttccggcgagccggggcgtacgccggtgcgcgtcggggtgtcgatcggcgactcgctgtccgccttgcacggggtgatcggtgtgctgcttgccctgcgccatcgcgagcagcagcacggcgccggccagcaggtggatgtggccttgtacgagtcggtgttcaacctgatggaaagcctgattcctgaatattcggtgttcggcacggtgcgcgaaccggccggcagcagcttgcccggcatcgcgccgaccaacgcctaccgttgcaaggatggaaagtatgcgttgatcgccggcaatggcgacagcatctaccgacgcttgatggagaagatcgaacgcctggacctggccgacgacccggaactggcgcaaaacgatggccgcgtacgccatgtggcccgcatcgacgcggcgatttccacctggacggccgagcgcaacctcgatgcggtactcgccgcgctgaaggacgccaacatcccctccggcaagatctacgacgccgccgacattgccgccgacccccattaccaggcgcgcgacatgctgctcgccagccagctggacgacggcaccgccgtcaccttgcccggcattgtccccaagctgaccgccacacctggccgcgtgcagtcgcgcgcgccgagcctggggcagcacaccgatgcggtgctcgacggcatcggtatcgacgcaccgacccgcgccgcctggcgcgctcgcggcctgatctgaaccaaggagcccttcaatgaaacgcctgtacctgcaggaagtcgccacccgtgacggcttccagaacgaaaagagctttatcgacaccgagcagaaaatcgccctgatcgatgcgctgagccagtgcggctacgccaaaatcgaagtgacctcgttcacctcgcccaaggccatccccgccttgcgcgatgccgaggcggtgatggccgggatccagcgccaaagcggcgtggaatacacggtgctggtgcccaacgtgcgtggtgccgaacgggcgctgggctgtggcatcgacgaggccaatctggtgatgtcggtgagcgagccgcacaaccgttccaacctgcgcatgacccgcgaacagtcgttcgcccagctcagggaagtggtgggggtgatcgggcgtgggccggtggcggtcaatgtgtcgctgtccacggtgtttggttgcccgatgcagggggatgtgccggtcgacgaggtgctggcgtggatcgggcggttcgccgagctgggtgtgcgcggcgtcacgctgtgcgacaccaccgggatggcctatccgacgcaggtggagaatttgtcacggcaggtgcgcgagcgctttcccgagctgcaactgaccctgcatttccataacacccggggcatggcgctggccaatacgttgggggcgttgcaggccgggatcgaccgcttcgacgcgtcgcttggcggcctcggcggctgcccttatgcccccggcgcgagcggcaatgtgtgcatggaagacctggtgcacatgctccacctgatgggctatgacaccggcctgcacctggaccgcgtactggcggcgtccgcccgcttgccggggctgatcggccatgccacccccggccagatcctaaaggccggcaagcgcctggacctgcatcccattcctgcacacgtgcacagcctcagccaacaggtagcccaccatgattgatcatctcgaccacctggtcctcaccacgattgaccttgccgcctgcacagacttctacacccgcgtcatgggcctgcgcctggagacctttggcaatggccgcatcgctttccgtttcggcaaccagaaaatcaatgtgcacgagcgcgggcatgagttcgagcccaaggcccacctgccggtgccgggcgcgctggacctgtgctttatcgccagtgtctcgctggacgcggtggtcagccatttgaacacccaggcctggccgatcatcgagggcccggtgctgcgtaccggtgcgaccgggccgattcgctcggtgtatgtgcgtgacccggacctgaacctcatcgaaatctccgagcaggtgcctgcatgaatatcgtgtttctcgacggcgcgagcctgccgtcagcgttgccgcgcccggctcaagccagcgcctggaccgcgcgcgaaaccacccgccccgagcaagtgcttgaagccctggccgacgccgacgtggcgatcaccaacaaggtgcgcatcgaccgtgcgaccctggcgcaattgccgcgcttgcaactgatctgcgtggcggccaccggctacgactgcgtggacatcgccgcctgccgcgatcagggcgtgacggtgtgcaacgtgccggcgtacagcgcggtcagtgtggccgaatcggttattggcgccttgtttgcgctgcgccgccacctgctggcgtaccgcgcggcgtcggccagccagtggccgcagtcgtcgcatttttgcgtgcacggcgcgccgatccaggacctgcaaggctcgaccctgggcatcgtcgggcgcggtgatatcggcagccgcgtggcgcgcctggccaaggccctcgacatcaccgtgctgttcgccgaacaccgtggcgcgccgcaggtgagggcgggctacaccgccttcaacgaggtgttggccaggtccgatgcgctgaccttgcattgcccgctcacgccccacacgcgctacctgatcggcgccgccgagatcgcccggatgaagcccggcgcgttgctgatcaacaccgcacgcggtgcgctggtggatgaaaacgccgtgctcgatgggctcgccagtggtcaattgggcggcgcggcgctggatgtgctgcacgtggagccgccgcaggccgaccactcgttgctgcattgcgagcatcccaatctgctggtcacgccccacgtcgcctgggccagccaaagcagcgtcgcacgcctcaaggccgtgctggccgccaacatcgaggcattcgcggcacaccgaccgaccaacgtggtgacctgaacgccccagcgacttccttcctgaaacctataggcagagccatgacaaaaataatcagctcgtccgtcgactccgtgaatcaggcgccggcacggcgcacaccgctgtaccagcacctgtatgtgcaagtgctggcggccattgtgctgggggggatcctcggccacttcagcccgggcctgggcgaacagatgaagcccttgggcgacaccttcatcaagctgatcaagatgctgatcgcgccgatcatcttctgcacggtggtcagcggtatcgccggcatgcaggacctcaagcgcatcggccgcatcggcttcaagtcgctggtctactttgaagtactgaccaccatcgccctggtggtcggcctgatcggcgtcaacctgttcaagccgggcgccggcatgcacatcgacccggccagcctcgacgttgcggccatcgccggctacaccaaggcggcccacgaccagagcgtggtcggcttcctcacccacatcgtgcccagcaccgtgttcggtgcgtttaccgacggcgacatcctccatgtgttgttcatctcggtgctgtttgcctttggcctgcaactgctgggcgacactggcaagccgttgctcaacaccatcgacctagtggccaaggcgttcttccggatgctcaagatcgtcatgtacctggcgccgctgggcgcgttcggcggcatggcgttcaccgtgggcaaatacggcgtacagtccctgggcgcctacgtgaacctgctgctgtgctactacgccaccgggctggtattcgtgttcgtggtgctcaacctggtggcgcggctggccggtttcagcctttggaagttcctcaagtacatccgtgaagaactggtgctggtgctgggtacgtcgtcctccgaatcggccttgccgcgcctgatgggcaagctggaaaagctcggctgcgagaagtccactgtcggcctggtggtgccgtccggttactgcttcaacctcgacggcagctgcatcaacatgacggtgctggcgatcttcattgcccaggcgctggacattgacgtgtcgctgtatcaccaggtgaccctgctgttgattctgctgctgacttccaaaggcgcggcgagcgtgacgggtggtgcgtttattaccctggccgccacccttggctcgatcgatgtgatcccggcggcgggcctggtgctgttgttgggcgtgtaccggtttatctcggagggtggcgcgctgatcaacgtgatcggcaacggcgttgccacgctgttcattgcgcgctgggatggggcgttggatcgcgagcagctcaagcgtgaattggggtagggcgcaggctgggaaatgtacgccgctgtacactcgctgtgcaccacgcagcgtggggtgtagagtggccggcaattcccaggcaaaggtgacccccggatggcgcaatcggcaaaaccgcgaggcaagaaccaggacacgggctggcgaggctcggtcgatgtgtggctggacgccgcctacgcggcgttgaaagagtcgggcatcgacgccgtgcgcgtgatgccgctggccaagcagttgggcttgtcgcgtaccagtttctattggttcttcgaggaccgcgagcaactgctcgccgccttgctggcccgttggcgcgacaagaacaccggcaacctggtgcaccagtgcgagcgttacgccgaaagcatttgcgaggcgattctcaacgtctttgaatgctggctgaaccctgagctgttcgactcgcagttcgaatttgccgtgcgcagttgggcgatgcagtcggcggaggtctcggcggaaatcgcgctggccgatgacacccgtatcaacgccctgaccggcatgttccggcgctttggctacgatgacgaggccgccgatgtgcgcgcgcggaccatctacctcacgcagatcggctacatctcgatgaacaccagcgaggacgtggtggtgcgcttccggcgtattccccagtacgtcagcgtgttcaccggcaagcccttgaagcggcgcgaactggaccgcttcttcggggcgtttggctacgccgagaccgcaccgggggagtttgagctgctttagaggtccttgaccaaccgcaacgcgtcgtagatcgccgcatgggtgttgcgtgcggccaccgcatcgccgatgcggaacagttggaagcgaccctcggggttggtcaccaggtgctgcgcgttgccggcgatcaagtcatgctgctcgaccgcgccgccgttgctggaatgcccacgcaggtcgaagtacaggtcatccagcggcagggtgccgtggttgaccaccacctggtccaccacccgctgcttgtgcaccgcgccgtagtcactgccgaaagtgaccagcagccgaccgtcgcgttgctccaccatctcgacccgataggtcacggtaaaggttacgtccaggtcctgcaggctgcgcatgtagggcaccaggttcatggccatgacttccggcgcgaacgagcggtccggggtgacgatttcgacgctggcaccgctctgcgcaatcacctcggccgcttgcagggcggcgtggtcaccggcgtcgtcgaagatcagcacatggcgccccggcttgacgtcgccggaaatgatgtcccaggtcgacaccaccagctcattgccctgggccagcacctcggtatgcggcaggccgccggtcgccacgatcaccacatccggctccagcgccagcacggcctcggcctcggcccaggtgttgaagtggaacttgacacccaggcgttcgcactggctcatgcgccagtcgatgatgccgatcatttcgcggcgccgctcgctcagggcggtcaggcggatctgcccaccgggccggtccgccgcttccagcaccgtgacgtcatgcccgcgctcgccggcgacccgcgccgcttccagcccggcaggtcccgtgccgataatcagcactttgcgccgcaccgccgccttggggatgtgatggggcatgctggtttcgcgaccggtggcggggttgtggatgcaataggcggcaccgccctggtagatgcggtccaggcagtaattggcgccgacgcagggccgaatgtcttcttcacgccgttcgatgatcttgcgcacgatatgcgggtcggtcatatgggcgcgggtcatgccgaccatgtccaccttgcccgaggcgatggcgtagcgcgccgtggcaacgtcggggattttcgccgcatggaaggtggggaacccggtagacgcgcgaatctcgccggcaaaatccaggtgcggcgagttgcgcatgccctggatcgggatcacatcggtgaggcccgcgtccgtgtcgatatgcccgcgcaccacattgaggaagtccaccaggccgctgtccttgagcatgtgcgacacctgcaacccttcgcaggcgccgaacccgcccggcagcgcctcgtcgccggtgtagcgcacgccgagcaggaagtcttcaccgacccgctggcgaatgccgcgcaggatgtcgaaggtaaagcgcatgcggttttccagcgagccgccgtacgggccatccagatcgttggtgagcggcgaccagaactggtccatcaaatgcccgtaggcttgcagctccaggccatccaacccggcggcctgcatgcgctcggccgcgtcgacgtagtctttgatgattcgctcgatgtcccagtcttccagcttcttcgggaaggaacggtgcgaggcctcgcgccggtgtgaaggcgacaccactggcagccagtcggccttgtcccagcgtgtgcggcggcccaggtgtgtcagctggatcatcaccgccgcgccgtgttcgtggcactcgtccgtcagatccttcagccagccgaccacttcatccttgtacgccagcacgttgttgaacaccggcgggctgtcccgcgacaccgctgcggagcctgcggtcatggtcaaggccacaccggccttggcgcgttcgacgtggtaggcgcggtacagcgcctgcggcatgccgtccaccgggtaggccggttcgtgggccgtggtcatgatccggttgcgcagtgtcaggtgcttgatcttgtagggctgcagcaggggatcgctggacatcagagtgtgctccgtcgtgggcatcatcaggcttggcgatttgaaattagggtaaatgtacaggtgtgtcaataatgctcgacatgcatgtacattttaagtgcgacctgctgatgttctgcaaacgatgcaggcacgtgagagcacggtgggcaaggcggtggcggcgtattacgcggcgaacaaggcacggtccgaggggatgttcaggttgtggtttacgggctttttgtggtgagcggggcaagcccgctcaccacaaaaagccggcaagccacaacaacccgcaaaccacagcgtcaggcgtatgaactgccatgggctgctctcaacaaatcgcgcacggcatcggtgcgcagcagcagggtcatctgcgcctcgtcgatcacgatttccgcgatgatcaacgcgcagatcagcggcgcggtcacgaaccaatggcaccagcattgggttgccagcgaaacggctacgccgatgatccacagcgccaatacccacttgggcgcgcgctgttgcagcggcacccacaaccgctgcagccgtttcagccgggcagtgtgcagtttcaacgactcttcaaggagtgataaggacgaattcatttctcacgctcgctgagctatccgggcgtggctgggaaagggattgcccagccacgacaagttgatgcattcaacttcgatccagtgcccgtttccaggcagtgctgcacagcttttgaatgcaacgcacataccctcggtgtccaataggacaaagcatcgatagcaccgggttgttctgaacatcatggaaaagatgcgcatggtggggcctggtttacttaaagattccaactgagttcaaacagcgttccgccgttttccattttccggcacgtcaccgcaccgccgtgggcgagggcaatcgcgcgcaccaccgccaggcccaggccgctgccaccctgggcgcgggaccgcgagttttcgccgcgctggaaggcatcgaacaggtgcatggccaggtcctcatcgatcccggggccatcgtcgcgcaccctcaggtagtgcatgccatcgcgcgtgctcaggtgcacgttgacgttgccgggcgtggcgtgccgacgcacgttgtcgagcagggccagcagcgcctggcggattcgagcggggtcgcagcgcagggtgcggcgttgcaggtccagttgcagggtaaaaccggcggcgaccaggctcggttcgaacagccgcacatcctcttcaatgccggccgccaggtcggcgtcttgcacgttgagttcgaggtagccgctgtcgcccaggcccaccacccgcaggtcctcgatcatccgcgccaatccttcgacctgaccgagcaggctgtagaactgcgccgtgtccggttcgaatacgccctcggccaagccttgcaggcggccgcgcaggatggtcagcggcgtgcgcagttcatgggcaatcgccgcattccagaatgcctgctcctgggccatgcgcttcaggcgctgggccatgctgttgaagtcatccaccaggatcgccgcctcaccgatggactggtcaccggcgacggcttgcacgtcgaggtcgccatccgccagtttgcgcaggttttcggccaccgagttgagcggcatcaggatccgccgcgacagccgcgtggccacgaaggcacccaccgccaggctgacgcaggtggtcaaggccatccacgcccactcgacattggccggcagccaggcatcggcctgctcgtccgagagcggccagtaggtccataacagcgcataaaacacgtaggagccgatcacggccagggcgatcacgcagagcaccaccgccgacatggccgcaatgatctggcggctcaagccattgagcttcttcacacgccactcccgaaccggtagcccacgccgcgaatgctcgccggcacgccttgcagccccaggtcttcgatcttgcggcgcaacttgctgatatggctgtcgaccgtacgttccaggctgtcgctttccggtgagcacaacgccaacaattccgcgcggctgaacacgcgtttgggggccctagccaattgggcgagcagtttgaattcggtgacggtcagcagcagcggcaacaccttgccctcgatattcagcgtgacctgatggctttcgatatcgatttcaaacccgtccacccgcaacacattggcaccggcggcatatttgtagtcgatggagcgtcgcagcacggcctgggtacgcgccaccacctcggccgggttgaacggcttgacgatatagtcgtcggcaccgatgcgcagccccatcagcttgtccatgtcctggtcctgggcagtcagcatgatcaccggcgtattgccgcgatggcgcacttcggccaggaccttccagccatccacatgcggcatcagcacgtccagcagcatcaggtccggcttgagggtctggtgcagttcgagggcgcgccggccatcgagggcgtgcgcggtacgaaagccactgcgcttgagataggcgatcaggatgtcggcgatctcgggctcgtcttcggcgatcaggatcagcgcctgggcgtctcggacgctgttcggacggggcgtcgatgtaaaggggaaatcggtcatagtctgctcggtgaataaaccttgtcgtggttgccgctccatggccacgcttgcaagtgttgatcatagcttctgggtgagggcgcccaacatctggttggcggtggaaatcactttggagttcatctcataggcccgttgcgtggtgatcatgttgaccatctcttcaacggtgctcacgttggaggtctccagggaccgttgcagggtggtgccgaagccattgagccccggcgtaccgacctgtggcgcgccgctggaggcggtctccaggaacaggttgttgccgattgcctgcaagcccgcagggttgatgaagtcggcggtctgcaggttgccgatcacttgcgcagcggggttgccggccacggtgatcgacaccgtgccatcctggcccacggtgaaggtcttggcgttgtccggcaccacgacggccggttccagcgcaaagccactggccgtgaccacctggccattggcattcaggtgaaaggtgccgtcgcgggtatagccggtggtgccgtccggctgcagcacctggaaaaaaccgcgcccgttcaccgccaggtccagcggttgcccggtggtctgcaggctgccggcgctgaagtttttctgggtgccgacgatctgcacccccgtgcccagttgcaaccccgacggcaacgcactgttctgtgtcgactgcgcacccggctggcgcttgatctggtagagcaagtcctggaactcggcgcgatcacgtttgaacccggtggtcgagacgttcgccaggttgttggaaatcgtcgtcagctgcgtgtcctgggccgacaagccggtttttgcaacgtacagggctggaatcatgccgttctccgtgtgaacccggtcgaccgggcactctgatgaaacctattgtgcgcaacgaacgtgcgcattcaggggaggttttgtggaggaatgatggagagcggcattttttgttggccctgatcacttcaatccgggttcgatcaggccggcgacgccacgtccgatgacctccgggtagctgtgttcggcatccaggttggtcagcaccaccaccgtcaaccggtcgtcgaggtagcgcgcgatggacgaggtaaagccttgccaggagccgccgtgctcgaccacggggtggccgttgatcgtgcggatttcccagccgaacccgtagccttgcgcccgctgtttgccggcgtaggggtagggcgtccacatccgttgcagcgaggcgtgtgtcagcagggtttcatcgtagagggcgcggtcccagcgctccaggtcgcggacagtgaaatagagcgtaccgtcagccgtggcattgaaggtcggcgacacccattcctgattcctcagctcaccgtcgacccgctcgtagcccgccgcccggttgggcactatctcaaggtccgagatgacccgtgatgagcgcatgcccagcggtgtgaagatgcgctgctggagaaactcaccatagggctgcccgctgacacgctggatcaggatgccgagcagcacgaaattggtgttttcgtaggcccagttctgcccggccttgaagtccagcggcagcttggtgatcgccttggccagctgcgcttcgctgaagtcgcggcgtatatccaatgggccgccgggcttttgcagcgctggcgtgtcgtaggccgacaagccggacgtgtgggacaacagatgggcgaccgtgatcggcgcccaactcgccggtgcctcggggaagtacgtgcggatgctgtcgtccaggccgaccttgccttgctccaccagcatcatgaccgccgttgcggtaaaggatttacccaccgagccggattgcaacacgctgtcggcgctcatgggcacgttgagttccacattcgccaggccatagcccttggcgagcacggcctggccgtttcggtagatacccagggccaggcctggcaactgctgccgggttatttctgcgttgacatagcggtcgatggccgagcgctgttcgtccgtgagcggcgtggctatcgccaggggcgcggacatcagcaggacactcgccgcaagggttcggaacatgggcacctctgaagcgtttttgcggtttcaggaggtgccagtgtgcgcgaggggggtggatgtttgcgggaggtttgatggagggtgcatgtagtcgatagggccagcactcactgggggggggatgaatttcacctacctgttggatgtttatcgaacgtgtgggcaagtgatcatctcgacagagtggatttagcctttgatttggtcggttggcgtgcctagtactcgatgcaactctccagcgagtgcgatcaactgctgttccagcgcttcgacttcgcaaaggctgattccctccttgatgacttgcagggttttggcttttctcgtcggtgcgggtccgaggttatgcgcgtcttgggaaaccaacacttggcgcagtaggttgttgatcacggtttgataaccggtacctgcattttccgctcgctcgcgggcggctgcaatcaccgcatcatccagcatgatagtgattcgggttttgcctttgttgctggcgactgcaccgcgcttgccggagctgaagtcgtattcgtctttcatggttcaagcctccaagtactggcgccgttcatttttggatgcgcgcctggcactgataatccgtacaaaatttggatcgcggtaggtgtaggccactaccaatacgcgtccctttgcgtccgtacccatgattatccaacgctcttcgtcgtgatcattgtcttgtatggttagagcggtctcgtcgtaaaacaccggttctgcatcggcaaggctcacgcccttgtgcttttgctgattagtgatgctttttgctttgtcgtattgaatcctgaaagttctcattatgcatattttatatgtatataaaagcaattggacaaagcgacagtcagggcattggttcagcgtctgcgggtcccgatttgggtacgcacatccctacctatcagtgagggatcgattttgaggagggtgcccgcgtatgtccgtgcgtaaccggtgatccgttaagtagtcagattccgattccatagccagataaggtcttatgtcgatatcagaccaacccccgccgtttccaggctattttcgcgccggtcagcccgcgtaaggtgactcatcattcaaaaatgatgatcgcctgaccctccagtcagtcctcacgccgatcaccgagaacaacaaaaacaatgaatagcctccattccagcgactcgaacggccagttggcgcaaggcttcaagccgcgccatgtcaccatgctttccattgcggggattatcggcgcggggttgtttgtcgggtccgggcatgcgattgcggcggcggggccggcggtgctgctggcctatctgttttccggcctgctggtggtgctggtcatgcgcatgctgggggagatggcggtggccaacccggacaccggttcattctcgacctacgccgaccaggccatcggccgctgggccggcttcaccatcggctggctgtactggtggttctgggtgctggtgattcccatcgaggccctggccgccgggcatatcctcaaccagtggttcccgcagatcgacgcttggctgtttgccttgttgtcgatctttttgttggtggtcaccaacctgttcagtgtgtccaagtacggcgaattcgagttctggttcgccatggccaaggtgatcgcgatcatcgcttttatcggcgtgggcttcgcggtgctgatgggctgggtgccggagcgtgaggccagtgggcttggccagttgatgcaggaccatggcgggtttgcgcccaacgggctgtcggcggtggtcggcgcctttatcaccatcatgttcagttttatcggcaccgaagcggtcaccatcgcggcggccgagtccagtaacccggcgcagaacatcgcccgggctacgcgctcggtgatgtggcgcatcggggtgttctacctgttgtcgatcttcgtggtgatctccgtggtgccatgggatgacccgttgctggcctcggtcggctcttatcagcgtgcgttggagttgatgaacattccccacgccaagctgctggtggacgtggtggtgctgatcgccgtggccagttgcatgaactcttccatttacatcgcctcgcgcatgctgttttccctcggcaagcggggagatgcccccgcgctgatgaacaagacctcggcggcgagtgtgcccagggcggcggtgatcgccagcaccatcctgggcgcgggcgtgaccctgctcagttacttcatgccggccgggctgttccagttcctgctggccagctcgggggccatcgcgttgctggtgtacctggtgatcgcggtttcgcagttgcgcatgcgcaagatcctgcgccagcgcaaggtcacggtgagcttccagatgtggctgtttccgtggctgacctggctggtcatcgcgttcatttgcgcggccttgacggtgatgctggtcacgcccgaacatcgtttcgaagtctcttcgaccctcgtgctgtccctgataatttccttgatcggcttgctcacggcgcggcacccggaacccacgcaaaaaccagtggccgcagtttcgcaatcatgagtggccgcccggtcagcagtatcgttttcctgctgctggaccagttcaccctgatgtcgctggcggcggcggtggagccgttgcgcatggccaaccagctctcgggccaggagctttacacgtggcacacggctagcccggacggcaacccggtgtgggccagtgacggtgtgccgatcacgcctgacggttcgatcctcagtgtgccctccgccgacattgtgttggtgtgtggcggcatcggcattcagggcaccgtgaccggcgaactggtcaagtggctgcgcggccaggcgcgttacgccaagcgactggggggcatttgcacgggcagctttgtgttggcgcgggccggcttgctcgacggctatgaatgcagcgtgcattgggagtggttggcggcgatgcaggaggcctttccacgggtgacggtcagttccagcctgttcagcctcgaccgcgaccggctcaccagttcaggcggcacggcgcccctggacatgatgctgcacctgatcggccgtgatcacgggcatgaactgtcggcggcgatctcggacatgtttgtctacgagcgcatccgcaacgagcaggaccaccagcgcgtacccctcaagcacatgctcggcacccagcagcccaagctgcaggaagtcgtggcattgatggaagccaacctggaagaaccgatcaacctggatgaactggcggcgtatgtcgcgctgtcgcgtcgccagctcgagcgcatgttccagaagtacctgcactgttcgccctcgcgctactaccttcgcttgcggctgatccgcgcgcggcagttgctcaagcagacaccgatttcaatcgtcgaattggccgtgctctgcggctttgtgtccacgccgcatttctccaagtgctatcgcgagtacttcggcgtgccgcccagtgacgagcgttccgtcacggacagcgagcggtccatcgtgctcaagccggcgttgcacacattgccggcgcccgcgccaatgaatgtattggagcaggcgcggggcgaggcaacgtttgccagtgtgaaaaacctgaagccctgaactcagcgcatatgcaagatgatcgggctgctgctcgccgggtcggtgtgcccgcgcaacttgctcaccgccttcacatccaccgcgccgccgttgttaccccaggtgccgcgcacatagctgagcacctcggcgatttgcgggtcggtcagttgctcacggaacgccggcatgcgataggcgtccggcacgccagccgtcaccacgcgttgcgagccgttgagggtgatgttgatggctgaggcgctttccttggccagggccgaggtggcgccggccaggggtggcatccattcgggctggcccttgccgtcaaggccgtggcacgaggcgcagcgggtcgcgtaggtgtgggcgccgggggtgtccgggttggcggcgaccgcctgatactgccagggagtgccgtcgcgctgtgggtcgccgggcagtgacttgaggtagcgggcgatggcggccaggtcgtcgtcctgcatgaactgcgtggagttgttgaaggcttcggtcatcgaaccgtagaccaccgcatgggcattgcgcccggtcttgaggaactgcacgatctgcgcctcgtcccagcggcccagtccggtgttggggtcctggcgcaggctgggtgcataccagccgtcgagcagggcgccggcaaggaacggcgcgccggcctcatccagtgctttctcgttgaaggccaggccgcgtggcgtgtggcaactgccgcaatggccggggccttggacgatataagcgccacggttccacagcgcgtcctggttgggtttggccgcgtacggcgcggtcggtgcgaacacgccgttccacagtgcgatgggccagcgcaggttgagcggccacggaatatcactggggatattcggctggttggccggttgcacgccctgcatgaagaacgcgtacagcgctttcatgtcgtcgtcgctgagcttgacgtaggacgggtagggcatcgccgggtacaaccgtcggccacccggtgccacgccgtggcgcaccgcgcggtcgaagtcggccaggctgtaggtgccgatcccggtggttttgtccggggtgatgttggtggcatggatcgcccccaacggcgtggccatttccaggccaccggcaaacggcgccttgcccggcaggctgtggcaggccacgcagtcgctgacacgcgcgacatattcaccgcggctgaccagagccggctcgaaggtggcgttggccggtgtttgtgcaaacggtgtagcggtctcacgggtgacgtaccaggccagcaggcctgcggcgaccaggcagggcagcgccagccagcctgcggttcttgcgaatcgacggttgttcatgggcatttcctgaaagtcagctgaaggtgtgtcggctcaagggcaggctgcgaacacgctggccggtcaattgcgccactgcattcgccacggctggtgccacggcgggcaacggtggctcgccgataccgcccatcttttcgccactctcgacgatccgcacatgcacccgcgccatctgcgccggcgccaggatcggatacaggtcgtagttgcgcgcccgtggcttgccgtccacgtacaccgcttcttccagcaaggtctgagacaagcccagcgccaccgcgccattcacctgcgcctcgacaatcgccgggttgacgatgctgcccgggtcaatggcctgccagatgtcgtgcacccttaccttgccattctcgatggacacctcggcgatcgccgccgtgtgcgaaccgaacggcgatgccatggccacgccgcgtgcgcgccggctgccgtcttcagcggtgaaggggccacgcttccagccgccggacagttcaaccgcggcgttcagcagggtggtcagccgtgggttgtcgcgcagcaggtgcaggcgcagttcatagggatcctgtttgcccttgtccgccagttcgtcgaggaacgattcatagaaaaagtcattcagcgaattgcccaccgaacgccagtagccgagcatgggcgcgcctttgacgtagatctgcgcgatgcgtttgttggggatggcgtaggacttgcccgacaatccttcgaccgccgtggggtcgatcttgtcgccctgtttgccggcgagggcttcggtcgggccttcggtggcgcttaccgcttcgatggccaccggcaggcctttgtcatccagtgcggcgcggaacttgaccacggccaccgggcgcaatacatcgcgcaggaactcttcctcacgactccagatcagcttgaccggacggcccaccgccttggcgagcgcgatggcctgcgggtaggggttggccgactcatataggaaatgccggccgaaaaagccgccgagcaacggcgagtgcaggttgatcttcgctgcgtccaggccggtgcgcttggcgatgtcggtgcggaacatgtccggcgcctggttgggcagccagatatccaggctgccgtccgggttgaagcgggccagggcggagggcggctccaactggccgtggttgaggtactggttgtgatacgtcgcttcgacctgggtcttggcgcctttcagcgcggcggccacgtcgccttctttctcatcgtcacgggccggcccttgctgggcggcgaggaactcgaaatgcttgtcgctggagaagtccgccggcatcacgcgcagcgtcgagtcggcggccgcttcctgccagtcgacctggaccgcttccaccgcacgcttggcgtgccaccagcgttcagccaccaccgccaccgcaccgggcagtacgtgcactgaatgcacgcctttcatgccttcgacctgtgtctggttacgcaggctgcccacggtcatgcccaggcgtggcgcatgctggacggcggcgtgaagcatatcgtcgactttcaggtcgatgctgtagagcgccttgccagtggatttgtcgtaggcgtcgaggcgcttgaccggcttgccgatccagcggaactggctcggatcgcgcagggtgatgctggcgggatcgggcacgggcatgtcgagggcgctactggccagttcgccgtagcccagcgagcggcccgatgctgcgtgcacgactcgaccaggctgggtggtcagttcgcccaccggcacgccgaattgtttggcgccggcctgcagcaacatcgcgcgggcgagggcgccgaggcggcgcatggtcgggtagctcatgcgcaccgacatgctgccgccggtgatgcgcaggccgttctccatcaccacataggtttcgccgggcggcgcggcctcgacgatgaaagtggcggggtcggcatccagttcttcgccgacaatctgcgccatggcggtgtgggtgccttgcccgccttccatgaaggggctgagcaggcgcaccgtgccgtccgggcgaatctccagaaacgccggcacctgggtaccgcgttcagcggcagtggcggcttgcacccggcccgagcccagtggcaggccgaaaccaatgaccagcgcgcccacggcggtgctcgccagaaagcggcggcgtgacaggttgaccggtgcatcgagcagttcgttgaggatgttcattacgcgccctcctgcttggccagggcatcgacggccgcatggatggcgttgtacgtgccgcagcggcacaggttgatcatggccgcgtcgatctgcgccttgctcggtgcgggggtgtgcttgagcagcgccgtggccgccatcacctgcccggactggcagtagccgcattgcgccacctgttgctcgacccaggtcgcgaccacacgcttgcccacctcgtcgtcttcaatcgcttcgatggtggtgatttcccgcccgaccaccccggccaccggcgtgacgcaggagcgcaccacattgccgtccaccagcaccgaacaggcgccgcactgggccaggccgcagccgtacttggtgccggtcaggcccaggtcatcgcggatcacccacagcaatggggtgtccgcgtcggcatcgacctgataggccttttggttgattcgtaattccatggctcacctgctgatcatcggtaggtgcggcctgttttaggtgtgaacgcagtggccgcttattgtcgaactctagaccagcgcgcaagggctatctatccgttaatcgataagtcggaggatcaggcaagtattcaagagaaatgggccagtctggtgttatcgaggcggcgattgatccaggtcaatgcaaggtcggatcggcgggcatgaatgggcagggcgggcgtagagcgggttgtagcggtgatatcatggcgccactattctggcgcggtgcgttactgcgacccatggaaatgaggctttaggcaaatgctcaagaatgcaccactgcgtctgaaactgttgttgatcctgctactgcccatgctcgggttcctgacgttggccggcgtgttcgtggtggacaactacaagacgctgcgcgacatggacgcgaccgtgacggccagcgccaccgcgcagaagctgagccgactcattaccacgctacaacgtgagcgcggcgccagcggggttttcctgggcagtggcggccagtcgatgggcgacaggatgttgcagatgcgccaggactccagcgcggcggtcgaggtggtacgcggtttgacggcatcgggtggtgcgagcctggatggcgtgctgcgtgccttggaccaactgccggcaacccgtgggcaaatcgacaaactgagcctcaatagcaccgagtccggcgcgcgttacaccgagatcatccaagccctggtcgggtatacccattccctggaagccagcgtcaacaacgcgaccctggtctatgccctcggcgccttgaaccaattcatcgaaatgaaagaacgcgccggacgcgagcgtgtggtgttggggctggtattcaaccaggaccactttgatgcgacgctgctgtcgcgcttcagccgcaacctgggtgagttcaatgcctactacgatgcgttccgccgcaaggcaccggtagtcacgcttcaacaattcgatgagcacatgcaaaaccccgccgccgtggaagttggcaggttgcaacgcctggcgtttgaagtgccgatggggcaggcgctgggcatcaggccagaggcgtggtttgaaacctccacccgccgcatcgacctgatgagccaagtggaagaagccctgggccaaagtgtcagcgacctggcgaagcatgagcgcgatgccgccagtcgtgccctgtggttgaccattggcgcggtggttgtggccctgttggcggtcgtggtgttgtcctggctgatcatccgcatgatcggttcggcggtgcgcgacctgaaccgggtactgaacgacctggcgcagcgcgatctcacggcacgggcgacgtaccagagccgggacgaattcggccagatctcacacaacctcaaccgcatggcgcaagagatcagtggcgtcgtgcaggaaatcggcaacgccaccgcccaagtggcgacggcggcggaggagtcctccacggtcacgatccagaccagccagagcgtcgagcagcagcgccagagcaccgagctggtagcgacggcgatcaaccagatgagcgccaccgtgcgcgaagtggcgcacagcaccaacgatgcggcgcagatgtcgcagcgggtcaataccagcaccgcacaagggcgtgccgaaatagaaagcaccatcgcgctgatccgtcagctctcggggcaggccgaggaaaccgcgctgatcattggtgatctgaaacaggaaagcgacggcatttccaccgtgcttgacgttattcgcggcattgccgagcaaaccaatctgctggccttgaatgcggcgatcgaagcggcgcgggccggggaccatggccgtgggttcgccgtggtggcgtccgaagtccgtgtgcttgcgcagaagacccaggagtccacgggcagcattcagcagatgatcagcaacctgcagaccggctccgaccgtgcggccacgtccatgcaggaaaccctgggcaaggcgcaggacggtgcgagcaaggtggaacgtgcgggtgagttgctgcaagagatcgctgaaggggtgtcgggtatcagtgatcgcaacatgcagatcgcctcggccgccgaagagcagagtgcggtctcggaggacatcaaccgtaacgtcaacgagatcaatgacctggtgatccaggtcagtgccggggccgaacagacggccgttaccagccaggagctggcgcgcctggccgagcagcagcaacgtctggtcaatcggttcaaggtggcctgatcgattggcgcacagcacgccctgccgaatgcagccacctgcgtcacagggcgttggttaagcgaaatcttcctcgaagtgttcccgctcacctcgcgtgtcgccctggcgccgcaccacctccatctgccgcagttccacgcggcggatcttgccggagatggtcttgggcagttcgctgacgaactcgatacgccgcacccgtttgtaaggcgccaggtgctcgcgggcaaaggccaggatgtgccgggccagctcggcgtcgcccggcgcatcatgggccaggatcaggaacgccttgggcaccgccaggcgcaacgggtcggggctcggcaccacggccacttccatgaccgccgggtgttcgatcaaggcgctttccaactcgaacgggctgatgcggtagtcggacgccttgaacacatcgtcggcgcgcccgacgaaagtgatgtagccgtcggcgtcgacctgcgcggtgtcgccggtgcggtagtagccgtcgcgcatgacctcggcggttttctccgggctgtcctcgtagcacagcatcaggccgagggggcgcacatccaggggcagggcgacttcgccttcgctgcccggaatgccgtccgggtcgagcaaggccacctggtagcccggcagcgggcggcccatggagccgggcttgagtacctggcctggcgtgttgcccaccagcgcggtggtttccgattggccgaaaccatcacgcagcggcaagccccaggcgtgctggatctgctcgatgatttccgggttcagcggctcgcccgcgccgaccagttcgcgcaggctcaggcgtgatttgtagctggcgagatcctcctggatcagcatgcgccacacggtgggcggcgcgcacaggctggtcacgccgtagcgttccaacgcactgagcaaggccggcgcgctgaaccgtgcgacgttatggataaagatgcacgcgccggcattccacggggcgaacaggcagctccaggcatgcttggcccagccgggtgacgagatattaaggtgcaggtcgcccggctgcaggccgatccagtacatggtcgacaggtggcccaccgggtagctctggtggctgtgcagcaccatctttggcttggatgtggtgccggaggtgaagtagagcagcatcgggtcggtggccagggtgcgaccttcggcctcgaagtgctcggggtgttcgaaggcggcgctgtgggccacccaaccttgcggcgccgagcccacgcagacgcgactgcaaccgtccgccagcccgacgaatttatgcacgtgggcttcgccgaccaccaggtgacgcacctgcccgcgttcgatgcggtcgcgcaggtcgtcggggttcagcagggcggtggcggggatgaccacggcgccgagcttgaacgcggcgagcatggtgtcccacagcgccacatcgttgccgagcatcaacagcacccggtcaccgcgacgcacaccgagggcgcgcaagtggttggccacctggttggagcgcgtggccagttgctcgaagctgtagcgctgctcactgccgtcttcttcgacgatccacagtgcatctgccgcgttgccctcggccattgtgtcgaaatagtccagggcccagttgaattcgtccagttgcggccaacggaaatcccggacagcggtggcgtagtcggtgcggtgagcgagcagaaaatcccgagcggccaggaagggctgggtcatggtggctgtccttaattattgttgtggggactgaccccccggctggaccgagaggctggaccgagtataggcacgcataaatcagagcagaacgctcaaaaacaccggtgcgttgtgcaaaaaagtcatgggtgttgcgccaggcagcagtgagattgacggttaagacataaaagtccaagatggaattataagtacaaaaacatgcgattcatctctttcccactcttgccaaaccaacaacaacttgcgagaacccgatcatgaagaaacgctccctcgtcaccgtcctggccttgagcctgcttgcatccggccccttggccgccgccgagaaaaccctgcgcatcggcatcgaggcggcttacccaccgttcgcgtccaagaccgaggaaggcaagatcgtcggcttcgactacgacatcggcaatgcgttgtgtgcgcagatgaaggtcaagtgcgtgtgggtcgaaggtgagttcgacggcctgattccttccctcaaggtgaagaaaatcgatatggcgctgtcgtccatgaccatcaacgaagaccgcaagaagtcggtggatttcacccacaagtattacttcacctcatcgcggctggtgatgaaggaaggcgccgtggtggacgaccagtacgccagcctcaagggcaagaccgtcggcgtgcagcgcgcaaccaccacggatcgctacgccaccgaggtgttcgagcccaagggcatcaacgtcaagcgctacaacaataacgaagagatctacatggacctggccgccgggcggctggatgcgatcttcgccgacaccatccccttgaatgacttcctgcagatgccccgtggccagggctacgcgtttgtcggcccggaactcaaggacccgaaatacgtgggcgagggcgccgggattgccgtgcgcaagggcaatagcgagttggtcagccagttgaacgcggccatcgacggcattcgcgccagtggcgagtaccagaagatttcgcagcagtacttcaaggccgacatctacggcgactgacgcccaggcaaactcgatcaatgtgggagggggcttgcccccgatagcggtctttcattgccagatgtattggctgatgcagcgccatcgggggcaagccccctcccacatttgatttacagtgttcgatcaggtttttaattctttcaaatgcttgtagaccgtcgcccgccccatgcccagcacattggccacatagttcgacgcgctcttgcccttgaacgcgccttcggcatgcaacgccagcaccagctcacgcttgtggtcgcgcgtcagcaaattcaggctcaactgccgctcgcgcaaccacgcatgcaaaaacgtgttgatgcgttcctgccagtcatcacgaaacaacgcgtccggctgcgggatcagcttgctcggcgacaggaacaagtccagcgccgccttggcgttttcaaacagtgaaatattcaggttgatgcacagcaccgccaggcgtcggccttggtggtcgtgcagcacggtgctcaggctgcggattttctgaccgtcccagttgagcttttcgtacgggccgatattcacctcgctgacgtcggcgtcgagcatgtcctccagcgccgagtcatcgccgatgctgcgcttggacaggttgttggcgatgtaatcgaccttttgcgagcgcaggtcatgcagcaccgcttcggcgtgggggaagaacagcgtggcgatggcgtcggccattgcgcggaagttctgcatgacggtgtcttgttcagcggtgttcatcaatggggctccaggcgggcaggggagagcataccagcgtcgaggccgaagcgtgtcagcgcctccggcagcgctgcgccgcgcaccagtgcggcactggcctggcccatggccggtgaggtctggatgccataaccgccctgtgccgctacccagaacaggcctggtaccacggaatcaaaacccgcgagcaaatcaccgtcgtgcacaaagctgcgcagaccggcccaggtgcgggtcgggcggcggatggtcagggtcgtggcttcttcgatctggtagatgcccatggcgatgtccagttcttcaggctgaatgtcctggggggcgaccgggtcggcgttggccggtgagccaaggaacatgccggcgtcgggtttcatgtagaaggattcgtccagcgccaccagcatcggccagtgatgactgtcgacgccgtcggggccggcgaagatgaacgccgagcgccgcttgggctgcaagccgatggacgcggccccggcgagcccgccgatgtgatcggcccaggcgccggcggcgttgatgatgatcggcgcggtgtaggaggcgtcctgggtttgtaccagccagatgccgtcgccgtcgcggctcaagccgagcacgtggctgtcggtacgcacctcgccaccgttgcgacggataccgcgcaggtagccctggtgcagggcgtcggtgtcgatgtcactggcggtggggtcatacagcgcaccgtgaactttttcgcggcgcaggatcggcaacttcgcgcaggcctggtcggcgctgagcagctcgacctgggccacggtggccttggcactctggtattgggtgttcagctcggctgcatcaccgatgaagtccacggtcatttcgccccgtggcgtgagcaacgggtgttcgcagaaacccggcggcgggttgtcgaaaaacgcccggctggccagggtcagcgcccgcacctgcggggtgccataggcggcgctgaacagtgccgccgaacgcccggtggagtgataggccgggtggctttcgcgctccagcacgagcaccttgccgtgctgcgacaaccagaaaccggtggaggcgccggcgataccgccgccaatgatgatgaaatctgcgtggttcatagctgtctccagagggcattggccagggcgatgtcttccaggcccaggccgatggagcggaagaatacatgacggtcgtaggtcggaggttgcacccattcgctgagcagttcgggcaagtcccccacgatggcacgcgggtcccacccgtgttgttcggtggcgatcagcatgtcacctgccgcgctaggggtggtctggcgatagtcgcagaatacctgcatcgcgttgaggctgtgcggcggcacttcgtgggcacgcggcgcattggtgctgatcgaggtgatcagcgccggtttgctcaagcgggcggggtcgagcaccggtccggccgacgaggtgcacagcaggatcacatcggcgtcgtccacggccgcatcgcagctggcggcgatgaccacccttgggtccaggcgcttgagttgggtgatagcctcggcgctggcgttggccaggctcggcgaaaacaggctgatgtgctgccagtcacgcagttgtttgacgtagtgcacatgcgcctgcgccaccttgccactgccaatgatcgccaggcgccttgcggataatggcgccaatgcctccaccgccagggctgtggttgccgcagtgcgggccgtggtcagttcggcagcatcgcacagcagcaggggttggccggtctgcatcgacatcaacaaggtccaagcggtcaccagcggcccttgctcacgcacgatatagggcgaggtcttgaccccgtacaccccatcctcggccagcacgcccaggtagttgataaagtcaccggcggcgcgtggaaactccaccagctgctgcgccggctgcacggcttgcccggccgccaggtcctggaacagcttgcgcaggatctgcggcacatcgacttttccgagcaattcgcgggcctgggcctggtggatcatatggggtgtgctggacatggggatctccgcaagtaaactaatttgtccattatggacttttagtttctttgggcaagcgtaaaagatcaccccgtaaagcgaaacccacccgacaattcagttttcagaaaccccaccaacgcactcaccgccttcggcacatggggcgaatacggtcgtatcaaatagatctcatcggcaaacgcgcccttgagcgtccagcccttgagtacctgcaccagcttgccgctggccaacgtggcgtgggcgctgaagtcggggagcagggcgatgcccaggtggttgagggccgcatcgcgcagggcttcgctgttgttggtggcgaagctgccggcgatgggcacggtcacacgctcgacgtttttgctgccgcgctcgaaggtccaggcgggctggtcggtgccgcgtgggtagaacaggcagttatgggcgcagaggtcattgggttcgcgcggttccccgtggcgttgcaggtattcccgggtagccaccagcaccgagccggtgtcgcacagcttccaggccacgtgggtttccggcacctggaagccgtgacgcacggccaggtcgtagccttcggcggccagtgaactcagggcgtcggacacgtccagctgaatgcgcacctgcgggtactgttgcaggaattccgacaagtgcggcaccaattgctgacgggcgaacgccactggcgcggtcagccgtaccagcccgcgaatctcgccgaccgagtcgcgtaccgaggagaagctgcgggcgatctgctcatacgcgctgcgcacttcacgggtcaacgacagccccgcgtcggtcagcctgacgctgcgcgtggtgcgggtgaccagtcgcgtgccggtggctttttccaggtcggaaatacgctggctcaccgccgacttgctcacgcccaggcgtgcggcagcggcggtgtaggtgccttgttcctccagcaccgacagccagtggatgtgcgtccacagcccttcgatctcggatttttccatgggtgcattgttcgctatggtggacaattagttctggattctgctctggtttggaacaaaccgaaagcctatcgtggtccccaacgctatccacctgggatccactgccatgaccacgaccatcgagcactacatcaacgaccagcgcgtgtcccgcgacgatcgctatcaggacgtctacaacccggccaccggcgaaaagaccgggcgcgtcgccctggccagccgccagaccgtgtccgaagccgtcgccgctgcccaggccgcgttcgccggttgggccgacacgccgccgatccgccgtgctcgcgtgctgttcgaatacctgcacctgctgcgcgaacgcaaggacgacctggcgcgcatcatcgtcgccgaacacggcaaggtcttcaccgacgcccagggcgaagtcgaccgtggcatcgacattttggagttcgcctgcggcatccccaacctgctcaagggcgagcattccgaccaagtgtcccgtggcatggacaactggacgatgcgccaaccgctgggcgtggtggcgggcgtgacgccgttcaacttcccggtgatggtgccgatgtggatgtacccgatcgccatcgcggcgggcaacaccttcatcctcaagccaagccccaccgacccgagcgcctcgctgttcatggccgaactgctgcgtgaagccggcttgcccaaaggcgtgttcaacgtggtgcagggcgacaaggaatcggtggacgcgctgatcgaacacccggacgtcaaggccgtgagctttgtcggctccacgccgattgcccaatacatctacgaaaccggtgcgcgcaacggcaagcgcgtgcaaggcctgggcggcgcgaaaaaccacatggtggtgatgcccgacgccgatatcgaaaaaaccgccgacgccttgatgggcgccgcctacggcagtgccggcgagcgctgcatggccatctccgtggcagtgctggtgggcgatgtgggtgacaaagtcatcgcggcgctgaccgaacgcgccaagcacctgcgcatcaccgacggtcgtgacctcaaggccgagatgggcccgattgtgtcccatgccgccctggaacgcatcagcggctacatcgaacaaggcgtgcaggccggcgcgcaactgctgctcgacgggcgtgactatgtgccgactgaggctggccttgaaaatggcttctggctcggtgcgaccctgttcgaccacgtgacccgagaaatgagcatctaccgcgaagaaatcttcggcccggtactggcctgcgtgcgtgtgaatgactttgccgaggcgatcaagctggtcaacgaccacgagttcggcaacggcgtcagctgctttacccgcgacggcaacatcgcccgcgaattcgcgcggcgcattgaagtgggcatggtcggcatcaacgtgccgatccccgtgccgatggcctggcacggctttggcggctggaagaaaagcctgttcggcgacatgcatgcctatggcaccgagggcgtgcgcttctacaccaaacagaagtcgatcatgcagcgctggtcggaaagcatcgagcagggcgcggagtttgcgatgccggtgtcgaagtaagcgccgacccgaccctcattgagcgatccacacgctgacgcacaacccttgttgcgccagcgtgtcgctgaatgccaactgtactcggcaaccggtacgctcgctgatcgccttgacgatcgacaagcccaagccggagccggcttgctccgagccgaggctgcgatagaacgggtcgaacacccgcagctgttcctcctcggcgatgcctgggccggtgtctttgacttgcagcagcacgccaccttcaatccccttcaccgacagatcgatacgcccgccttgcggggtgtagcggatggcgttgtccactaggttcttgaccagggtgaacaggtccagttcgttgaacagcacctgcacgtcctcggtgctttcgacgccgatatcgatctgcttgcgctcggccaggggcagtaagtcttccagcacctgtcgataaaggccatgcaccgacagcggcgtttgcacccgcgttgacggcgcttgcgccgccgccagcgccaacagttgatcgataaggttgcgcccgcgctcgataccccgggacagcggcaaaaaccgctcgcggctgaccgctgacaagtccgtcgcggccaggcgttcggcttgcagcgacagggcggtcatcggtgagcgcagctcatgggcggcgtcggcgacaaagcgacgctggctgtccatggactggccgacgcgggccagcaggcgattgatggcgaccacgaacgggcgcacttccgtgggcagatgctgctcgtcaatcgggtgcagtgcctgttcgtcgcgctggtcgatctcggcggccagtacgccgatggggcgaaacagtttgcgcaccaggtcgcccaccaccagcaacagcacggggaacaggatcaggaacggtagcagactgcgccaggcgctctcgcgggcatccttgtcgcgggcgtcctgttcctgggccacggcgatacgttcgccctttgaggtggtgtgcaccagcacccgaaaggcttcgccggccacttgcaccgtggcgaggccatcggcgagcgtggtggggaacggcaggggcaacgcctcgtcactgccgcctgtcgcctggttgccatcgcccaggtgctggatgatcacccgcgattcttcatcatcgccgtcaatcgccttgccctgggggtagtgcagcgtcatctgttggcggtcgaacagcatggccacctggcgcaaggtggcgtcctgttgttcgtgggcttcatcaaaggccgagacaaacgcaaacacgctggccagcagcgccaccaacagaatcgccagggacagcgtcaccgagaggcgcagctgcaccgactcgctcaaacgttttttgaaaccatccatcccatgcccctgacgttcttgatcacgtgactgcccaacttgcgccgcaaggcgtgaatcaggaactcgatggcgttgctttcaacctcattgccccagccatacaggcggtcttccagttcgctgcgtgacaggattgctcccgggcggatcagcaaggcttgcaacagcgcaaattcacgactggacagggccacgccacgcagttcctcggtgctggcttctttggagagcaggtccagcgacaccacgccgttaccgagcaacgacgacgcgctgccgcctttgcggcgcagtacggcgcgcatgcgggcgagcagttcgggcatgtcgaaaggtttgagcaagtagtcgtcggcaccgccatcgaggccacgcaggcggtcatcgaggctgtcgcgggcagtgatgatcagcagcggcagcgcgttgttgcgcgcacggatgatctccagcacttgcaggccgtccttgccgggcaggccgaggtccaacagcaccaggtcgtaggggtgggtgtcgagggcggccagggcggtgaggccgttcttgacccagtcggcggcgtagctggcgtcgctgagggcgcgctggatcgcatcgccaatcatggggtcgtcttcgaccagcagtatccgcatatccctctccgaaaaaaacgcggcgagatcatcgccgcgtctgtattgaagcatctgggcagacatttgtccggcatcagcccttcatcgtatcgaaggccttgagcaggtcatccatcgcggccttgcagtcggcctggttcgggctgcctgcgcgcaacgcctccagtgcgcggtcgatggctttatccagcacatgccagtcactggcggcgcggggcttgattccggcttcagcggagtcccagctggtttccaggtccttaatgcgggctttggccgcgggcaggtcgttcttggcgacgagggccgatacgtccaccgcgatgttgcggaactcggacaggtcgcccagtttcgacgcctggtgttggctggcggcggcacgggtggtgtccttgggcttatcggcgggtttggagcagccggtggcgatgcccagcatgaagatcgcagaaacaatggcgacgcggcggatcaggtgttgaacagggcgcatgaggatttccttgagtgggttgttcatgaggtgatggctttgcggttgccgacgctcagttgcgctacggcgaccagcaggacaatgacgcagaggaacagcgcgctggtccaactggcgcccatacccaggccgccgtaggtcttggcttgggtgagcaggtcgccgagggaggcgccaaacgggcgggtgaggatgtaggcgatccagaaggtcagcacactgttgacccccaggcgccaggccaccagggccacggcgatcaaaccggcgaagatcaccgcgccgagggtgaagcccaggcccagtgcttcggtggccaggtcgccggcggcggtgccgagggcaaaggtgcagagcaccgtggtccagtagaacccttcacgccgaggagtgacgatgtcgcggatcgacaggctgcgttcggtacggaaccagaccatgaagttgaggcccagcagcaccgagaaaatcgccgtgctggtgtacaggctcacgtcgagtttatcggtgagaatgtcggtgatctgcgtgccgacgatgctcaccagtactacggtgagccagtagatccatggggtgtaggctttggtgcgcagctgcaagcacagcgcgcccgccagcagcgcggccatgccgaggctggtccagccggcgccgaaaccagcgtcgacggcgaggtagtccgcgccggtttcgcccacggtcgtggacaggattttgatcacccagaatgacagcgtcacctcgggtactttgttcagccaacgggctgctgtggcattcatcgggttacctctccttgatggcgcggcggtgggcgcaggagagaaggtaaaccgcgaaacttagctgggactgagggccgctgcgtttttacagcacatgggccaaacccagcgtggtgaggtgcaccacgctgcccatgttcggcgcatgcaggcccgaactgcgcaccaggatggcttggccgggcacaccctcatccggttgcaacgccacggtcagggtgcaggtgttgccaccgaattcgcgctcggtgaccacgccacggcaaccggaatcgtcggtggtgctcaggtgcagttgctccgggcgcagcatgatgcgtgcagcaccgtgattggcctggcggtcgaccgacacacgccccaacgcgcagtgggcccagccgccctcgatttgcgcgggtatgactacggcctcgccgagaaacaatgcggtctgttcgtccacggggtactggtacaggtccatcggatgccccgattgcaccaggcgcccctggcgcatcaccgccaactggtcggcgaacgacagcgcctcactttgatcgtgggtcaccagaatggtggtgatgcccgcatcgctcagcagccgtgcgaccatcttgcgcatggccgagcgcaggccggtgtccagtgccgaaaacggttcatccagcagcatcagccgcggctgttgcgccaacgcccgcgccagcgccacccgttgctgctggccgccggacagttcgtgaggccaacgttgggccatgttggcgtccagggacacgctgtccatcagctcggcgatgcgttcgtgccgcgtggcgtgtctggtggcaaggccaaagccgatattgtcggccacggtcatgtgcgggaacagcgcgccgtcctgcggcacataaccgatctggcgctggtgcgcgggcacggcgtgggtggcgtccaccagcacctggccgttgagggtcaggctgccgctgtcggggaattcaaaaccggcaatcatgcgcagcaaggtggtcttgcccgagccggatggtccgacgatcaccgtgcggctgccgttgggcactgccaggctgacgtcggccagggcgcgcagggtgccgaaggtcttgcagagggcgtggagttcgagggcgttcatcggcctgccgtgcgtttggattggtggtaaaggaggccggtcaacggcagtgagagcaggatcatgatcaacgcgtaaggtgctgctgcggcgtagtcgatctcgctggtcatcgcccagaagccggtggccagggtgcgcgtgccgttgggggcgagcagcagggtggcggtcagctcgttggtgatcgccaggaacaccagcgccgcgcccgctgcggcagccggagccgccaggcgcatcgtaatcagccacagggcgcggcccggcgagcggccaaggctgcgcgccatgttttccagctccacaggcgcctgggcgataccggcgcgcaggctgactagcgcccgtggcaggaacatcagcaggtaggcgagcaatacggtgatggtggtctggtagatcggccgggcgaagtggatagtcaccgtgaccagcgccagcgccacgacaatgccgggcaacgaactggtgatgtagttgcagctttccaaaatgcgttgcaggcgccccggtgcacgaatcgacagccaggcaatcggcaccgccgcgcaagtggtcaacaccgcaccggcaatacccaacagcacggtttgttccagtgccggcagcaactcgctgaactgccagacctcgcgaccaccggcgatcagccatttgcccagggtgaccagcggcacgccgagggccaaggcaccggtcgcggcttgcaagccgagggcgagcagggtggttgcggggctcagccgcacgatgcgttgctcgcgggcgctgccggaaccgacccgcgcataacgtgcatggccgcgagcggcggactcgacgctgagcatcgccaggcaacacagggccagcaccgccgcgagcatattcgccgccgggccgttaaaggtggatttgaactgatcgaaaatcgccgtggtgaaggtgtcgaagcggatcatcgcgtacaggccatattcggccagcagatgcaggcccaccagcagcgcaccgccgcagatcgccaggcgcaactggggcaacaccacgcgccagaacaccgcccagggcttgaggcccagggactcggccacgtcttcaattgcagggtccagccggcgcagggtcgccgccaccggcaggtacagaaaggggaaataggcaatcaccgacaccagcacgccagcgggcaagccatggatcgacggcaccaggctgacccacgcgtaactgtgcacaaacgccggcaccgccagcggcgcgaccgccagcaacgaccaggcgcggcggccgggcaggtcggtgcgctcggtcaaccaggcgagcgcgatgcccaacacgatgcacaacggcaaggtgaacagcaccagcagcacggtgttggtcagcaactcgccgacgcgcgggcgccagaccagcgcttcgatctgcgcccagccgatttgccacgacacgccgattacaaacgcgatcggcaacagcgccaacaacgaaaccagcaccgacaaaccggtgacccaggtgcccccacggcttttgaacaggctgtgggggcgtttgcgtggcggcgcgtgggcgatgccgggaatcgacgattcaggcagcaatcagagcagtccggcctgggtcatcaactcgacggccttcttgctgttgagcttggacgcgtcgaccttgggggcatccagttgtgccagcggggtcagcttggggttggattgagcgttctcgccgaccgcgtattcaaacgagttaccgtccttgaggatcgcctggccgtctttgccggtgatccacttcaagaaggcctgggcctgctcctgatgcttgctggaggccaagacaccggcaccggagatgctcacaaacgcgcccgggtcctggtgcttgaagtagtgcagttgggtatttttgctgttttcgccggtcttggattggtcgacgaagctgtagtagtgatagatcacaccgctgtcgacctggccggcgttgacggccttgagcaccgcgctgttgccacggtagatgctcgcgttggccttcattgccttgagccagtcaagggttgcggcttcgcccttgagttcgagcacggcggcgacgatggcctggaagtcggcaccggccggtgacgcggcccagcggcctttccagctgggcgacgccaggtccagcagggatttgggcaggtcggcttctttcaatttgctcgggttgtacacgaacaccgtggagcgcgcagcaatgcccacccatttgccatgggccgggcggtaggcggcgtccacctgttcacgcgtggtcggcgcgaccggggcgaacaggcccgcattgtccaccagcaccatggccggggagttttcagtgaggaacacatccgccggcgaggccgcgccttcctgcacgagctggttgcccatctcggtgtcgtcgccattgcggatggttaccggaatcccggtttcctgggtgaagccttcgacccacgccttggtcaggctttcatgctgggcgttgtacaccacgatgccgaccggctcgctggcggcatacacatgcccggcactgaccagggccgtggcgagcagggcttgtttgacgaacgaggggaggcgagtggtcatgcggtgagcgctccggggttttttgactgcacgggaaatccgcgagaggtcgattgagagtagaccaataggaatcatttgcatgttggggcgcggcgaatgtagagctgggaatgagaaaaaaacgtcaaaaatacagttaacaaatgtgatgagggtgatcaggcgtagcaggccaaaagcgggaggtggtttggttgtttttcaacatgagggttgacggccaaggtaatgccgaatactgtacataaacacagtgtttagcgctgaccaaccaaacctcggcaacctcagccatgccaaacactgtgtgcaagttaacggattaacttgatgcacaggctcgttttaccgagccatttttattgatagagagggaactcatgtcctacccagaaagcaaactcaccggtctgatcggtttcgcccaagccgcaaaagtgacaggtggctggtccggccctgtggtcagtatcaccacgctcgatcaactcaaggccaatatcggcgacaccaccccacgggtactggtgatcaacagtaatatctcggcgtcgagcctgaccaaagtcaacatgggcgccaacaagaccctgattggctcgttccagaaccgtaccctggagaatattcacctgcgtgcaacggcgcagtcgcagaacatcattctgcagaatcttatcttcaagcattcggcaagtatcaaggccaatgacgatatccaggtctacttgaactacggcagcaagtattggatcgaccattgctctttcgtcgggcacagctggtccaccactgacggtagcgaagataaactactgtatatcggggaaaaggccgattatgccaccatcagcaactgtttctttggcagtcataagtatggtctgatcttcggtcacccggcggatgataacaatgccgcgttcaatggttacccgcacctgacgctgtgccataaccgcttcgacaatatggaagtgcgtgcgcctggcttgatgcgttacggttattttcatgtgtacaacaactacatcaataacttccacctcggttttaccctggcacaaaatgccaacatcctttctgaaagtaactactttggcgaaggcagccaaaataaaggcatgttggatgacaagggcaacgggaccttcaccgacatcaacagcgtgccgccaatcactaatcagaagtcgcccaaggcgcagtggacggcgtcatccaactatggctataccttgaagaccgccgcacaagccaaggattttacccagaagaatgccggcgcccagtcggttgcactggtctttggtagttgattagctagctttctacttagtgctcacttaataccggtgccactgtatttatatcaaggatataaatacagtgatggcctttataatctaaataattcttcatgttgcgacaggcaggcttccatgttaaaccttgtttcgcacttgcagagccaactatcccttgctctttcagccactatcaagttgttggctgtcatgtgctatttaatcttcgcttgtcacttaagcgtcagcaaaaggacatcatcatgaaacatgcgaatcacacacccactcgctggacacgggccgatgcgctgaaagttaatgagaatgacccgacgacgacacagccgttagtgagtcctgactttcctgtcatgagtgacacggtctttatctgggacaccatgcccttgcgtgaacttggtggtacggtggtatcggtcaatggctggtcagtgatcttcaccctgacggctgatcgtcgcccccatgatccacaattcatcaacgccgatggccgttacgacatcaagcgcgactgggaagaccgccatggccatgcgcgtatctgctactggtattcgcgcaccggcaaggactggatcttcggcggtcgtgtcatggccgaaggggtttcgccgaccacgcgggaatgggcaggtacaccgatcctgctgaataacaacggcgatatcgacctgtattacacctgcgtcacaccgggcgccaccattgccaaagtcagggggcaggtggtcacctcggataccggcgtgaccctgcggggctttgatcaggtcaaatcgttgtttgatgccgacggtatctattaccaaaccgaagcgcaaaattcgacttggaactttcgcgatcccagcccctttatcgatccaaaagatggcaggttgtacatggtgttcgaaggcaacgttgccggcgagcgcgggacacacgaagtaggcccgaatgaaataggcctggtgccgcccgggcatgaagatgtcggcggtgcgcgttatcaggtcggctgcatcggcattgcggtggccaaagacctcaacggtgacgagtgggagattttgccaccgctggtgaccgccgttggtgtgaacgaccagaccgaacggccgcactatgtgttccaggacaacaagtactacctgttcaccatcagtcacaagttcacctacgcggacggcgtgacgggcccggatggcgtgtatggtttcgtcagcgaccggctgttcggcccttacacaccgatgaacgcctccggcctggtgctcggcaatccgccttcgcagcccttccagacatactcccactgtgtaatgcccaacggcctcgtgacatcgtttatcgacagtgtgcccaccactggcgatgactaccgtatcggcggcaccgaagcgccgacggtcaggattgtgttgaagggcgatcgttcgtttgtgcaggaggcttatgactatggctacatcccggcgatgcgcgatgtagtgttgagccagtgactgccgtgcaatcgtcagcctgatcatctggtgtaaaccgatgcaaaagtgggagggggcttgcctcctcccacttttttaaccgcaatccagttcggtggccgaagcactgtcgagcaagctggcggtgtagagcagggtgtgtcagtgcgagcatgtttaattgatgaataaataaactaatggatggtttaattggtgatgggaatttccttcggatggtattcgtcttacaaacgcagcctacagtattatcggtaggacttagttgctggtttgctggcggtttttttttatcgtgcaggaacgctctacagtgagcgtttaagatgtgtgataaaaaatcatgaggtgttttggcttgacaaatttatgtgcggataaataatttaatcgcttgctttaaaaggtgtgaaatcatttttttataaaaacaaggatgaaaatgatggatgctcaaaattcagtaaaaaacagatcaaatgaaaggctctctaagaatgagatttatagagtgtgcgaggccggttacaacgaggtggctaatgcaattgtccggcatgccgcgcttagggaacttgaaaaattcggcgagattatctctgctcgtcctctgacgcatcagggtatggccttgttttttggcaccctttgggctttttttaaagacgtgcctgcgggaatcgttgcgttggctgcacgtgttacggatgaatggatcaaggaggatatgtggaatggcacagccaaggctgcgcatattctttatgcttcggttgatgagtatggtctgcaccagcatagtaaacatatgctgcctacccatcatcagatgtttaaacaactgacgactcatctggggctttccgatgctgatctgtttaatccgtctaacgtactcccagagggtactgcgatggggaataacacgcataggatgtaccgctccgagtttttgggcgaagcgttgggttttcatttggcttcggaaatgacctcgtccagagagtttcagtactttcttgaagggtttaaaaaatacgcccgtgagtatggcttggtggatgaggaagacccggtcttggcgttcttcgctatccactgcgaagtcgaacccatgcacgtagcgaccgggcgggagatcgtaatttcatacttggagaaaaacccaggtatcgctccacaagccatgcgcggtgcgatggcattcatggacggttttgaacatatgttttcggcacttaatcgtcgccttgccgacccgcagagtctttgaattctggagattgtctacatgtataagtcttatgagtgtcagatctgtcactacgtttattccgaggcattgggtgagcttctagtcgacgttgaggcaggaacaaggtggggcgagctagacgacaattttcagtgtccgcactgtcgggcaaagaaaaaaatgttcagagagattgtgaggtaaatgcacgactttctgagtgcaatgctattttcgacactgctttcaataagcgttggaccgatagccttgatcattctaaggcagtccatcgtctttggctttcgcagtgcattgcccgcagccctgggggcggcagttgccgacgcggtatttgcagctgtcgcctttacaggcttgaaggtggtcgaagcattttgggtcgccaatcatcagctattgacgtggggagcgattgcctacctcctttatcttggtgttaccacattcaagaacgctgctggcacgatgcagataacgtgcaccgcaggatttgtaccggtctttttactgacgttgactagcccgttcaccattgcggcgatttcttcctatgccatcgccagcggcgcccagcttcaggggcagggaatctactggaatttgctgggtgttctagtgggctcgtttctcgggcaaatgttgtatgcagcagggggtggggggatgaagaagctgtttgctgaacgttcaggttttggtgtgctcaatcgagcgagcggggtgtgtctgattggatttgcgggctggcagatggcttgtgctctatcgctataggcttgcccccgatggcggtggatgagtcagctagaggtaagctgactcatccaccgccatcggggcgagccacctcccacattaatcctgcgttcctagcgccgacctgtgcgggtactcacatccacccaaaccgccaacaccagaatgctgcccttcacgatcatctgccagtaactgtccacatccagcatcgacatgccgttatccaggctggtaatcaccagcgccccgagcaacgcgccatacaccgtgcccgagccgccgcgcatcgatgtgccgccaataaagcacgcggcgatggcatccaactcgcccatgctccccgccgacggcgagccggcagccaggcgcgcagtgttgaccaacccagcgagcgcacacatcacgcccatgatgccgaagatccacagcttcaccgcctgcacgttgatgcccgacaggcgcgtggcttccatattgctgcccaccgcatacacgcggcggccgaacacggtctggctggtgacgtagctgaatacaccgagcagtaccagcaacagcagcaccggcacggggatgccgtcgtagctgttgagggtggtgacgaacccggccagcaccgcgccgatcaccaccacgcgcaacacatcacgcacccatgaatgcgccgccaggccatgcagtgcgcggttgcgccgttgtttccaggtgaggaacagggtcagggcaaacagtaagacaccgaggccgatcccgaccgaatggggcaaatacccttggcccacatacaccaaggaaggcgacaccggcgcaatggtggtaccgcccgtgatccccaggagaatcccgcgaaacgccaacatcccgcccaggccaacgataaacgacgggatacgcaggtaggccgtcatgtagccgttggccaacccgatcatcaagccgcacagggcaaccaggctcaggttcgccaacagcggcacgtgatacaccacgtccaagatcgccgccaacccgcccagcaagccgagcaacgagcccaccgacaaatcgatctcgccactgatgatcaccagcaccatgccgcacgccaggatcccggtgatcgacatctgccgcagcaggttggacaggttgcgcggcgtgaggaagccaccctcggtctgccagctgaaaaacagccagatcaccgcgacggcgatcaccagggcaagcattttgtagcgggtaaacagctgtttgagctgattcatctacgcggtcttccgatcattattattgtgttggctgagcgccgcggcgagcacctgttcctgggtgagtccctcgttgatgaagtcgccgcgcaactggccgtcgccgatcaccagcacgcggttggacacgccgagcacttcggccagttccgaggagaccatgatgatcgacaccccctcggccgccagcgcgcccatcagtttatagatctcatacttggcgcccacgtccaccccgcgtgtgggctcatcgaggatcagcacgcggggcttggccatgagcattttcgccagtacggccttttgctggttgccaccggacaggctggtgatcggcaggaacgggctggcggtcttgaggtgcaggcgcgcgatctgctggtcgatgctgcccagttcggcttcggcgtcgatgcgcgtcaggtgggcgtaggtgtcgagcaccgccaaggtgatgttctggcccacgccgaagtcgggaatgatgccctggcgcttgcggtcctcgggcaccatgcacagcccggcgcggatcgatttgagcggcgtgcgcgtgtcgatcacctggccgtccagccacacctcggcgctgtagcggccggggtaggcgccgaacagcgccgacaccagttccgtgcgcccggcgccgaccaacccggcaatgccgaggatttccccgcgcttgagcacaaaggacacatcgtccacgcgcttgcgcctggggttgtcgacgtcgtagcaggtgacgttgcgcgcttcgaaaatcacctcgcctaccgcatggggctcggtggggtagaggttgctcatctcgcggccgaccatttgggtgatgatctgcgcaatgtccatgtcggccatggcggtggtcgcgatgtgcttgccgtcgcggattaccgcaacggtgtcgcataccgccgccacttcgtcgagcttgtgcgagatgtacacgcaggccacgcccttggccttgagaccgcggatgatatccagcagcacctcgatttccgagcgggtcagggccgaggagggctcgtcgagaatcagcagccgcgcctgtttgttcagggccttggcgatttccaccagctgctggtaaccgccgccgtactgcgacaccggcagcgccacgttcatgtccggcaccttgagctcgcgcatcaaagcctcggcacggtggaacatcgccgggtagttcatgcgcccacccggcagggtcagttcatggcccatgaagatgttttcggccaccgacaggtcgggcaccagggtcagttcctggtggatgatcacgatgccggcggcctcggtttcgctgatcgactgggccttgagtggctgcccgtcccagagaatttcaccgtcccaggtgccgtggggatagaccgccgatagcaccttcatcaaggtggatttaccggccccgttctcgccgcacaggccgacgcattcccccggccgcaccttgatatcgatgccgtccagcgcgttgacctcgccaaagcgtttgacgatgccgttcatttgcagcaggtagtcggacatggcggtcactgcccggccatctgctctttggtgtagaacccgtctttctccaacaggtcgatattggccttggtcagcggggtcggggtgagcaggatggtgtcgaccttcttgctgccattgtcgtactgcgagctgtaggtgggtttttcgttacgtgccagttgcaccgagagtttggccgcttcggtggcgatcagcttgagcggcttgtacacggtcatggtctgggtgccgtcgatcacgcgcttgaccgccgcgaggtcggcgtcctggccggagatcggcaccttacccgccagtttctgcgcggccagggcctggatcgcgccgccggcggtggcgtcgttggaggcgacgatggcgtcgatcttgttgttattgcgggtcagggcattctccacgatgctcagggcctcggtggggttccattccttcacccattgctgcccgaccaccttgatatcgcccttgtcgatggccggttgaagcaccttcatctggccttcgcgcagcaccttggcgttgttgtcggtgggcgcgccgccgagcagaaagtaattgcccttgggcgccgcttgcagcacgccgctggcctgcatttcgccgactttttcgttatcgaaggagatgtaggcgtcgatgtccgcgttgaggatcaggcggtcataggacaccaccttgatcccggctttcttggcttcggcgacggcgttggtgagcacggtggcgttgaacggcacgatgacgatcacatcgacgccacgggagatcaggttttcgatctgcgagatctgtttttgctcgttggcatcggccgattgcacgaagaccttggcgtcgagtttctctgcggcggcgacgaagtagtcgcggtcgcgggaccagcgttccaggcgcaggtcatcgatggaaaaaccgatcttcgggtgggctgagtcggccatgaccggcagggcgagcagggccagggcagtggcgatgagggtgcgtttcatggttgtgcgtccttttattgttgttggaaagacagtggcgaaacgggttttttgttgtgagcggttctgttgtggcgagcgggcttgctgtggtgagcgggcttgccccgcgttggggcgcgaagcggccccttcccggcgacatgttttacctgacacaccgcggcgcctggttctggggctgcttcgcagcccaacgcggggcaagcccgctcgccacaacaagcctggtcaccacaacaagcccgctcgccacacgttcagcggtagataaagcgattcacaataccttccagcatctcctgccggccactcaccgcctgcgggttcaactcctgcgcaaaggcatgctcggccagcgactccaggctgaattcacccgccagcaccgcttggcccagcggctgctgccagccggcgtaacgctggtccttgaactgctgcaaccggtcgttttcaaccatggctgctgctcgctccagcgccagggccaacacatccatcgccgccacatgtccgtggaacaggtccacctcatcaaggctctggcggcgtaccttggaatcgaaattgtagccgccattcttgaaacccccggccttgaggatttcataggtggccagggtcatttcctcgacgctgttggggaactggtcggtgtcccagccgttctgcgggtcgccacggttggcgtcgatgctgccgaaaatccccagggacacagcagtggcgatctcatgatgaaaactgtgcccggccagggtcgcgtggttggcctcgatgttcaccttgatctcatgctccagcccgaactcatgcaggaagccgaacaccgtggcgctgtcgtaatcgtattggtgcttggtcggctcctggggcttgggctcgatcagcaggtcgccggtgaagccgatcttgtgtttgtgctccaccaccatgcgcataaagcgcccgagctgttcgcgctcgcgcttgaggtcggtgttgagcagggtttcatagccttcacgaccgccccacagcacatagttggcgcccttgagccgcagcgtcgcgttcatcgcactgaacacctgggcggcggcgtaggcaaacacctccgggtccgggttgctcgcggcgccggcggcaaagcgcgggttgctgaagcagttggcggtgccccacagcagtttgatgccggtctgttcctgatggcgttccaggtggtcgaccatctgcgcaaagtgattgcggtattccttgagcgacctgccttcgggggcgacgtcggtgtcgtgaaagctgtagtagtcgatgcccagcttggagaaaaactcgaaggccgcgtccgccttgccgatggccagttccatcgggtcgccactgcgctgccatggccgcttgaacgtgcccacgccaaacatatccgcccctggccagacgaaggtgtgccaatagcaggccgccatgcgcaggtgctcgcgcatcggtttgccgaggatgattttattggcgtcgtaatggcgaaaggcgaggggagagtcgctgctggggccttcgaagcgaaccttctcgacaccggggaagtacggcatggcgttttccttattgttcttggcggtgtctggatactagcaacggcacctggcctgctgattatgaaaatcaccaacggacagtgcgattttgcgcggcaggggctaggctgttgcgaccggccccaggacaacaacaatgaaaaccctaccgcccgtgcaccgcatcgccttgctgttcaacggcagcaaaatctacgaccgtggcatcatcgccggcatcggcaattacctgagcagcacccgcgcttcctgggacttgttcctcgaggaggacttcctgtgccgcctcaaaggtatcgagcgctggcagggcgacggcatcattgccgacttcgatgacccactgatcggcgaggcgctggccggtagcaaggtgccggtggtggcggtgggcggatcctatgaagatgcacgcgcctaccccaagggcatcccctatgtggccaccgacaacgcggccttgatgaaactggcctacgagcatctgattgaggctggagtgacgcggtttgcctgtttcagcctgcccgaagcccaggccaatcgctgggcccaggagcgcgaaaaggccttcaagcggctgctgcaacgcgatggcttgccagtgcagatctatcgcggcctgggcaccagcgcgccgctgtgggacagcgcggtggagcagcagatcgcctggctgcaaagcctgcccaagcccatcgggattattgcggtcaccgacgcgcgcgcccggcaactgctgcaagcctgtctcaccgccggcatcgcggtgccggaagaggtggcgctgatcggtatcgacaacgacccactgacccgcaccctcacgcgcgtgccgttgagttcggtgatccagggcaccgaaaccatgggccgcaccgccgccgcgctgctgcaccagatgctgcacggcaagccttgcacgggcacgcaggtgctggtgccgccggatgcgatcaacgtgcaggcctcgagcctgcaccaacccttgggcaacccttacgtgatgcaggcgctgctgtttatccgccaatacgcctgccagggcatcaagaccgcccaggtggcggcttatgtcggggtgtcgcgttcatcgctggagtcgcactttcgcaaggcgcgcgggtgcagcgtgcacgatgagatcctgcgcttcaaactcgccagcgccgccaagggcttgcagggcaaccacctggcgattgccgacatcgcccagcagtgcggcttcaagtcggcgcagtacctgcacaccgtgttccggcgcgagttcggctgcacgccacgggaataccagcacagccattagaaactttgcaggcatcgcccattcgccgctggacttgcaccgtacagactagggagaatggttttttgtggcgtaaatggaagctcccatgaccgacagtgcccagcgtgccgccagcgacatcgacctgatgaccgaagtggccatgctttattacctcgacaacatcacccaggaagccattgccaagcgcttcgacctgtcgcgggtcaaggtcagtcgcttgctcaagcgcgcccgtgatgaaggggtggtggaggtgcgggtgttgcagcatccggccctgaacacggagttggagcaggcgctggtcgagcgtttccagttggaccgcgccttgatcgcggtcgaccacggcgaccccgacacccagcgctcggccgtggccagcctggtcgccaattacctgaacaagaccctcaccgacggcatgatcgtcgccgtcggcatgggccgcaacgtgggcgccgtggccgagaacgtgttcttgccggtgacgcgcaactgcacctttgtgtgcgccatcggcggctcgctcaaggccggcgaatacatgaaccccgaccatatctgccggcgcctggccctgcgttttggcgccgagagcgaaaccctgtatgccccggccctggtggccaacccggaactgcgcagcgtgctgatcaacaacgacaccgtgcgctccaccctcgaccgtgcgcgccgcgccgatatcgccttgatcggcatcggcgacatgagcgagaacagcaacatggtgcgcatgggctggttctcaccccaggaaatcgcccaggcccgggtgtcgggtacagtcggtgacatgatgggctacgactttatcgacatccatggccaaccggcggtcaacgccatgcagggccgggtgatcggcctgtcggtacaggaactggtgcgcattcccgacgtggtggcgattgccagcgaaaacaccaaggcggcggccaccctcggtgcgttgcgctccggggtgatcaacaccctggcgacgaccgtgtcgaatgcctacacgatcctcgccctggatgatgcaacgcgtcgctaggtgacatcttgtatgtggtgagcccgcttgttgtggtgaacaggcttgttgtggcgagcgggctttctgtggtgagcgggcttgccccgcgctgggtggcgaagccgccccaatccaggcaccgcatttattcagttagaactcattgacaggttctggggccgcttcgcagcccagcgcggggcaagcccgctcaccacagaaagcgggctcaccacacaaagcaggctcacaactacgccaccaaccgcgcctcaaccgattcggccaggttggtcaggatcaggcagcacgacaccgcacccgcgtccaacacccccagggagcgttcccccaggcggctggcacggccgatcttggccaccaggtcgcgggtggaatcgcggccctgggacgcggcgctttgcatccggtgcaacgcttcgcggaacgtcgcgccgctggcctgggcctgttcaaacgcttccaccgccgggatcaaggtgtccatcaggcacttgtcacccacgccagcgtcgctgatgtcctgcagtgaggtcaggccgccgcgcagcagcctggcgaaggtcgccccgtcgatgctgtcgcggtcgcgcacttcgtcggccatgccgatgaacaggctgccatacagcgggcccatggagccgccgatgccttccatcaacgccagggtcagttcgtccagcgcttcggccagggacagttcgcggccttccagagtcttgccgcagcgcgagaaccccttggccatgttgatgccgtggtcgccgtcgccgatggcgccgtccacttcactgaggtattcgcggttggcaacgatgatcgacaccaggttggtgacaatggcgccgccggtgttgctcgggaaatgttcgcgcatgcttcactccgactgggtcatgccgatggagcggcaaggttggtcgatcaggcggctcagctcggcgtctaggccgagcagggtcagggtcacgcccatcatttccagggacgtgaagtagttgcccacgtaacaacgatgaatgcgcaggcccttggcgcgcagttggcgctcgacctcggcgtagaaaatataaagctccatcaccggcgtggcgcccaggcccgagaccagcaccaccacgctctggtcctgggtgaagtcgcggtcggccaggatcggcgcaagcatgcgctcggccatggcggcggcggactccaccggcaccacttcgatacccggttcgccatggtggccgatgcccagttccatcaggccgtcggcaatctggaagttgggtttgcctaccgccggaatggtgcagggcgtgagccccacgccgatggagcggcaatggtccacggccttctgcgccacgcggatcacgccgtcaaggtcgtagccctgggcggcggcggcaccgccgatcttccacatgaagatctcgccggccacgccacgccgcttggcgatttcggcgagcggggcggaggccacgtcgtcgttggcgaccacggtgcggatgttcatggctttgctggcggccattttcatcgccagcttcacgttcatgttgtcgccggcatagttgccatacaggcatgccacgcccgcgccctggtcggcggcacggaacgcgtcgaagaagctcttggcggtgggcgaagagaagatctcgcccaccgccaccgcatccaccagccccgggccgacatagccgagaaacgccggctcatgccccgaaccgccgccggtgacgatgcccacctggccggccggtgagagggtgcgcttgccgatgacccgtggattgctctcgtactgcaccagttccgggtgcgcgaggaggatgcccgcgagcatgtcctcgaccaccaggtccggatcattgatgactcgattcatagggtgtttccttgttcttattcgtctggaatcggtttactgaatgctgtagccgccgtcgatcaccacgttttcgccggtgatcatcttggccgcgtcgctgaccaggtagagcaccaggccggcgatttcttccggctgggcgaagcgccccaccgggatctgcaatttggcccgttcgcccagttcgcccgcccaggctttcttgcccagcgcggtttcgacgatggttggcgacacggcgttgacgttgatgccgtggggcgcccattccatagccagtaccttggtcatgccgaccacggcagccttgctcgcgcagtaggccacatgccggtccaggccgatgacggcggcctgggaggcgaggttgacgatacgcccgccgccttgctcgatcatatgctgcgcacaggcctgcgccatgaagaagctggccttgagattgatatccagggtggtgtcccaggcgttttcatctacgtccagggccttgtcgagcagggcgacccccgcgctgttgaccaggtaatcgatgcgcccgagcccggcagcggcctgatccacggcggcctgcagcgaatcgagctggcgcaggtcggccaccagccccacatgacccgcgccgaggctggcagccacttcgaccaccgccgggtcacggtccagcaacgccacccgggcgccgcgctccaccagcaactgggcacaggccaggccgataccggcggcgcccccggtgatcacggcgcaacggccggtgaggtcgaacgcctggttccagaaattggacattgcacacactccacttagcgttttttcttgcgccagacatcaatcaacaccgcaagcacgatgatcaatcccttggccacttgttggtaatacgacgacaccccgagcaggttcaaaccgttgttgatcacaccgatcagcagcgcgccaaacaacgtgccgacaatgctgccggtgccacccgacaggctggtgccgccgatcaccaccgccgcaatcgcatccagctcataagacacgcccgcctggggcagggccgaggtggtgcgcgccgccagcaccacaccggccaaccccgccagcaggccggaaatcacatacaccgagaacgtgaccttgcgcacgccgatgccggaggtgcgcgcgcttttttcgttgccgcccacggcgtacacgtagcgcccgtaggtggtgtagcgcagcaccatccagaagatcagcgcgaccaccgcaaagataatgatcggcacgccaatggggccgagcttgccgatgcccagggcgaggaagctgtccggcaggtcggtgaccgggctgccgtcgttgagaataaaggtcatgccccgcgccacgctgagcatgccgagggtggcgacaaagggcgggatgctcaggttggccaccatgaaaccgttgaccacgccaagcatggccccggcaaacatccccgcactcaccgccgccagcaggccatagccctgggtggcgaccaacgcgctgcacaaaccggcaaaggccaggatcgagcccaccgacaggtcaatgcccttggtgaggatcacgtaggtcatgcccacggccagaatgccgttgatggaggtctggcgcaggatgtccatccagttgcgccaggtcatgaagtattcgctggaaaacgccagcaccagacacagcaggataaacaccagcggcaggccgaagcggtcgagggacaagcgcaggcgattgcgcggcggggcagtgacgggtgcggcgaggactttactgttcatgaggcaagactcaacaaggcttcctgggaaagggcggtatcgctgctgacggtcaccaggcggccgcccttgaacaccgcgatgcgatcactcaggtgcagcaattccggcgcctcggacgagaccacaatggccgcaccgccggcgcgcacgaattcgtcgagcaggtgatagatctcctgcttggcgccttcgtcgatgccgcgcgtcggctcatcgcacagcaggcagatcggctgggtcgacaggcatttggcgagcaccactttctgctggttgccgccgctcatggactccaccggcaggtccagggacgaaatcttgatctgcagacgcttgaccatgctctgcgccagggcctgttccttgcgcgcattgatcaccgaccagctcgacaattgcttgtaggccgacagcgcgatgttggcgaggatgctggcgctgagcaccaggccactgtccttgcggtcttcggtgaccagggacatgccggcgcggatggtcgccgctggcgtgccgatgggcaacggctggccttgcagggtggcactgccggcgtccggcagggtcaggccatacaggcagttgaggaattcgctgcggcccgagcccatcagcccatagatgccgaggatttcgccctggcgcagttgcaggctgatgtcctggaactcgccgtcgcggctcaggccactgacatccaggcacgtggtggcagcgcattcgcggccgactttatggtcgatgcgctgcagctcctggccgacgatgccgcgcaccaggtgggcgcggtcgatatcggccatgcgcccgctttccacaaaggcgccgtcgcggaagatgctgtagtcatcggcaatctgcgccagttcactcaggcggtgcgacacatagatgattccggcgccacgcgcggtcaggcggcggatcgccttgaacagggtttgcgcttcatgttcgccgatggccgaggtgggctcgtccatgatcatcacctggcagtcatggctgaacgccttggcgatctccaccagctggatctgcgccacgctcaggcgatgcatggggctggtggcatccacgtcgaactccaggctttgcagcagttggcgggtgcgtcggttcagttccttgctgtcgacgatacaaccggcgcggcgcggttcgcggcccagccatatattttcggcgacggtcatgtaggggatgggttccagctcctgggtgatcatcgccaccccggcggcgagcgccgcgctggggcggtcgaactgcaccggctggccgttgagcaggatgctgccggcgtcacgctgggtgatgcccatcaagatgctgaggaaggtggatttgccggcgccattgccgccgcacagtgcgtgcacgctgccggcccgcagggccaggcgcccgtcgcgcagggcagggaccccggcgtaggccttggaaacttgttcagcctggagcagtaatggcggggccatcggtgtgtcctcttgctgattttcttattaggtaggcttaggcaacagcctgatcatatgatcggatagtgatcatatgtttaaactggtcgagttggttttgtcaatggcttggcgcagcattcgcctgaggttttagggttttcgcgggttgctgccttgaaataagccttgacagcagcagggctgtcgtccgctaatgattgtgcataatttcagtgagtgatcatttgatcggtctgatggagaaacagtaatgggtgcacaaacgacgttttcggtggccatcggatgcgacgaggcgggctttgagctcaaggaaatgctcaagcgctttatcgaaggcctggggtatggggtcgaggactttggctgccattcgtccagcccggtgctgtatccggacatcgcagcggcggtggccacggcggtgggggcgggtgagcagcgcctgggtgtgctgatctgtggcaccggcatcggcatggcgatttccgccaacaagatcaagggtgtgcgggcggcccaggcccacgacacctattcggccgagcgcgcccgcaagagcaacgatgcgcagatcctgtccatcggtgcacgggtgatcggccccgagctggccaagagcatcgtcaaagtgttcctggagtcggagttcgaagcggagcgctccgggaagaaagtcgagcgcatcactgcgctcgaacaggcgaacagggcgttgccgtcagacgactgagccgcttcagaacagcgccttgacctgcaggcccagcaccagggcgttgtcgatgttgtcaccggaaaacgcccccggctcgatgatgtattgcacatccgggcgcagggtcagccagggggtggcctggtagccgtagctgagttcgatcagttgttcggcgttgttcaggttggggtagtcggtcccggccttgaaggcggcctgttcctgtacctcgcggctgcgcgggttcggcacggcacggccatagcccagcgctacggtgtcccgcggccggccctcgaacggtttgtacagcaccacacctgcgccataccacttgctgaacggcgacgccgcttcgctggcggcagaatactggccgaaggcgtgtaaaacacgaccgctggaggaatccgaagcccaaaccgcctggtcgatcagcaggtagtgaccgccgcgaccgctgacttccttgttgctgccgatgcgtttcacgtcggagctgtcgtagtaataacccagcttgtattcacccggcaggctgccggtgtgtttgtagatcaattcgatcggcaccacggtgccggtggtgtgcttggggtccaggcgccaggcgcggctggagttgccgttgctttgcgggtcgacgttgaacgcggccacgcgcagttgccaggccggcgagaagtcatatttaacccgcgcacccaggcgtgcattcgggtagttggtccaaccgctgccgccggacatattcagcgggtgcccgcagaacccggcgttcatgaagttgcacagaatcccgctgtcgaggccgccgaggtcattgcccatggccatgtagccgagcttgacgttcagcgccggggtgaacagcgtgcgttcgtagctcaactcggtgaggcgagtgtagaggccgccgtagttttcctggatcggcaggcggttgcccaccaggtcctcggaggcactgttgccgcgccggtcattgatcgtgagctggatgcgatcgccattggtgaggccgtagagcttgcccaggtcgaactgcacgccgagcttgaggttctgcgagtagcgcgccgaacggtgctggccgccatgggcgttgtaggcggtttcgccactgtagtcgccgctgaagcggatgccctgtgcgtcgagttcacggcgcaggccgccccagtcgccggtcagggtggtgtcatcggcttgcacgggcagggcggcacccagggccaggcccagcagcaggcgcccaaggggaatatgagaagtgggggtcatgcgggtttttccaggcacaaggcgcggcgccggggaggcgccgcgcgaacggggggttatggcagggcgtaggcgatcacgtagtcgccacggtcggtggactggcgtgcgccaccggcggtgatgacgatgtactgcttgccggttttcggcgacacgtaggtcatcgggccgccttggctgccgacgggcaggcgggctttccagacttcatcaccgttgccgctgttgaaggcgcgcaggtagaagtcctgggtgccggcgataaagatcaggccgccctgggtcgacagggtgccgccaagggtcggcaggccgatcttgatcggcaggtgcatgcggatgcccagggggccggtgtcttccacggtgccgaccggcacttgccaggcgaccttttgcgtcttcatgtcgatcgcggtcaaggtgccgaacggcggcgcctggcacggaatgccggccaccgacaggaagcggtttttgttcaccgcatacggcgtgcccttgagcggcacagcgcccatgccggtgttcagcgcttcgccaccggacgcggcctgggccttgttctgcgacggaatcatctggatccacaggcccaggcgcatgtcgttgacgaagataaaaccgtgcaccgggtcggtggaaatgctgccccagttcatgccgcccagggagcccgggaagctcagggatttatcggtgcccggcgcggtgtacaggccgtcgtagcgcatgcccttgaagtcgatgcggcacagcaactggtcaaacggcgtggcgccccacatgtccgattcggtcagggtctgtgcgccgatctgcggcatgccgaccgattttggctgggtcgccgagtagggttcgttggggatgttggcggccttgaccgggacttccttcacctcggtcagcggcttgccggtggcacggtcgagcacgtagatctgcccggccttggtgccgatcaccaccgcaggcacagccttgtcgctgccgggcggggtgaagtcgatcaggctcggctgcatcggcaggtcgaagtcccacaggtcattgtggacggtctggtacacccatttttccgcgccggtggaggcgtccagcgccagtaccgacgcgccgtatttgtgattgagctgggtgcgctcgacaccgtagatgtcggtggacgaactgcccatcggcaggaagaccgtgttcatcagcgggtcataggacatcggcgcccagctgttcggcgtgctgcgcacgtaggtgctgccgtcggccggggcttttttgtcttgcgggttgccggggtcgaacgcccagcgcatctggccggtgatcacgtcgaagccacggatcacgccgccgggcatgtcggtctgcacgttgtcggccacacgaccgccgaccaccacggtggtgccggcgatcagcggcgccgaggacagttggtagtagctgtccggcacgttacccaggccggctttcaaatccacctggccgtgggtgccgaagtcttcgcagaactggccggtgtcggcgtccacggcgatcaggcgtgcatcgatggtgttggtcagcaagcgacgctggcactgcgcaccggcgggcacgctggcggcgatgatcggcgagctgttcggttgggtcggctgggcaatcggagcggtggcgtcgaagtaggccatgccacggcaacgctgccacaccgccgatttggcgttgacctcgttcttccacagctctttgccggtgtcggcgtcgagggcgatcaggttgttgtgtggcgtgcagatgaacactttgttgccgatctgcagcggggtgagctggtcttcggcaccgttgccgtcgctgatggcgacgtcgccggtgtggtaggtccaggccactttaagcttgttgatgttgtcacgattgatctggtccagcgcagcgaagcggctgccaccttcggtgttgccgtagtgcgcccagtctttctgctcatcggcagcggccaccggcgtgatgccagggccgttaccggtgggagcaacgcttgggtgggcaacaaacatattgcccgccgccacggccacgcccaccgccaataccgccgccacgccataggcgccgcgagcaggccggttgaccagcagcgggtacaccagcgctaccaccgtgccgatcaccgcgaacatgaacacgcgggagaacagcggccagaacaccaggcccacatccgccaccgcccagagagccgtgccgaccaggaaggccgcgaacagccacgcgcccgccggcttgcgtcgggcaatcagcaggcccgacacggccatggccgcaccgccgatcaggaagtaccaggaacctcccaggctcaccagtttgccgccgccaatggccagcgcgaggccgagcagggcgatgatcacgcccaggcccagcagtaagattctagaggcgccagcggcgcgcgatgctcgtttcatgtcgacagcactcgaatgtgagagggcaaagacgcgattttagcaagataagtaaccagttagtacattgtgcgtggtaatagactcttacggggatggtgatgatcgcgcacaacaaaaagccgcttgcccggtgtcagcggcaagcggctcttgtcagcgatcaccgaaacgccggcacgacctgctcgataaacaacgccagcgacttcttcttctcggcatgggacaggctgttgtcgcaccagaagctgaactcatccacgcccagttcctggtagtactggatgcgcgggatgatttctgcggcggtgccgatcattgcggtcttgtgcaggctctccagctcgaactcggggcgaccggcgaacttctcttccgggctgggctccaggaagccgttgaccggcacgctcttgttgccgaaccaggcatcgaaggtgcgatagaaccgggagatggccttggccccgactttccagccgtccggatcgtcctcggcgtgcacgtgggtgtggcgcagcaccatcagttgcgggcgcggtacgccagggttgttgtccagggcagcctggaatttgttcttcaggtcgaggacttcttcgtcgcccttcatcagcggcgtgaccatcacgttgcaaccgttggccacggcgaagttgtgggagtccgggtcgcgggcggcgatccacatcggcgggttgggctgctggatcggcttgggcacgctggtggaggtggggaatttccagatgtcgccgtcatgggcgtagtcgccttgccacaacgcacgtaccaccgggaccatttcgcgcagggcctggccgccgctgctggcaggcatgccgccggccatgcggtcgaattccacctggtaggcgccacgggccaggccgacttccatgcgcccgttgctgatcacgtccagcagcgcacattcaccggccacccgcagcgggtgccagaacggcgcgatgatggtgccggcgccgaggtggatggtggtggtcttggctgcgaggtaagccagcagcggcatcgggcttggcgagatggtgtattccatggcgtggtgttcgccaatccacacggtgctgaagccaccggcctcggccatcagggtcaactcggtcaggtcttcgaacaactggcggtggctgacgctttcgtcccaacgttccatgtgtacgaacagggaaaacttcatgacgcttacctcggatctattgtgatcggcctgtcgactgcaggcccttaagtgctctcgccaatctgaagcatgccggtgatgacggctgttcggcggattgattgttggtataccataatacggaatatccgcaaaacatttctctccaacggtcacaccctcacctcacaaggaaggcgagcctgatgaacataaaacaaaaattgatcctggcctttgcggtgatcgccagtctgccggtgattctggtggctgtgctgatcatcctcaacgtgcgccatgcggcgcgggacggctttgtcgacagcagcgggcgcgagatccgccaggtcgacaatgccatgcagctgtttttcgaaggcatcagccagaacgtcggctacctggcggcgcacccgcaattgcagggcatccagggcgacctcaagcgttacctggccagcgacgccgcgcaagtcacccccggcgagcgtgaccagcaactgttcacgctgttcgaagggctggccaagagtcattcggcctacacctatttatcgctgggcaccgaagacggcggttatgtgttctggcccggtgaccccaagcttgccagctacgacccgcgcactcgcccgtggtacaaggcagccatggcagagccgggcaagacccggcgtaccgaggcctattactgggcggccgacgacgtggtgctggtcagtacggtgcaaagcttcaacgaccgccagggcaaggtcagcggggtggtgaacatcgacgtgtcgctcaagcagctcaccgatctggtcaagcagatcaagctgggggagagcggttacctgatgttgatggaggccaacaacacggtgttggtggacccgaatgacccgtcccacaacttcaagaaactcggcgagttgggcgagggttatcgccagttgagcgagaccggcgaaggcctggtgcaggtcgagttggcgggggagcgctacatggcgctggtgtggccgtccaaggcgttgggctggcgctttgtcggtgtagtgcgggaaagcgaggtgatggccggtgcggcgcgcctgacctggctgatcgccgccattgccgtggtgtgtggcgtgctgtttgccatggcgggcgcgtggtttgcagggttgatcgtcaagccgattcgcggtgtggccagcggcctggaaggtatcgcccagggcgaaggtgacctgaccgcacgcctgacggtgagcggccgcgatgaaacggcgcaactggccggctggttcaaccagttcctggaagcgatccgtacgctgatccagcgcattggccaggccgccgggcagatccatacccgctccggcagtgccactgaggtctcggtggaaatggccgatgtcgccgagcgccagcgtgaagccgtggacatggtgtccacggccttccatgaaatggtcgccacttccaacgaagtcgcgcgctcctgcagccaggccgccgactcggccgacaacggccagcgccaggcccacaccgggcagcagcagatcgatgcggcggtgagcagtgtcgggcgcttgagcgaagagatcggccactctgcccaggccatggagcagttggaaaaagacagcaacgatatccagtcgatcctcggcaccatccgatccatcgccgagcagaccaacctgctggccctcaacgccgccattgaggccgcccgcgccggagagcagggccgtggctttgcggtggtggcggacgaagtacgtgccctggccaagcgcacggcggattccaccggcgagatcgacggactgctgggcaacctggcgcggcgcacgcaccagatgggcaagcagatgcacgcgagcctggaggtgtcccaggaaaccgtggtgtcgatcaatgaggcgcgggccagctttgggttgatccgtgaatcggtggatgtgatccgcgacatgaacacccagatcgccaccgccgctgaagagcagcaccaagtggccgaggatatcaatcggcacatcagccagattcacggggatgcgcagttggtggcgagcctggccgactccacgcgccaggatgcacagcagttgacggcgttgtcgcagacgttgaaccagttggtcagccgcttccgcacctgatttttgtaggagctagcaagctcgctcctacagagagtgcagtcaggccggcatgggcagggcgcccatcttgccgtggcaatacaccagtggcccggcgttctgccggggcacgatcaggttcttcacagcgcccaccatgatcgcgtggtcgccgccttcatattcacgccacaactcgcactcgatcaccgccgtggcattcgctaggatcgggttgcccagttcactcaaggtccattcgatgccctgggccttgtccttgcccttgcgcgcaaaggcgtaggcttcggtctgctgcccaccggagagcacgtggatggcaaagcgcttgttcttgatcagcaccgggtacgagtcggagctgtagttggggcaaaacagcaccagggccgggtccatcgacagcgagctgaaggcactggcggtcagcccgacgatctggccctcgtcatccagcgtggtgatcacggtgaccccggacggaaacgaacccatcacttgtttgtagatggcggcatcgatcatgggaaggtcctcagacagtgtggcggtttttatggatttgtaggtctgatggtataccgtaatacgacgcgtgcaagatctttttcagccacccgatgaacgcatgcctttggtcatatcaccaataaatacggggttttcagcgagaaacagccataagccatgtggcacaattgcagatcagatgcgtgccaggactacggatcagtcttgtgaaaatgctggaataccataatatggtgttcatctgaggggcgccatgaagcgcccccggtttggcgtcaaacaactataagatcagaccaacgcgagttcatttccatgccccagatgtcccggcaagaccccctgatcgagcatcacacggtcgattacgtccctcccgcagagcgccacggaaaggcccgcgacctgttcaccctatggttcagcaccaacattgcaccgctgcccattgtcaccggcgccatggttgcccaggtgttccatctcaacctggtgtgggggctgctggcgattgccctcgggcatctgctcggcggcatcgtgattgccctcgcatccgcccagggcccgcgcatgggtatcccgcagatggtgcagagccggggccagttcggccgctatggcgcgctgttgatcgtgttctttgccgcgctgatctacatcggcttcttcatttccaacatcgtgctggccggcaagtccatcgtcggcatcgtgccgtcggtgccggttccggcgagcatcctgatcggtgcgctcagcgccaccgccatcggcgtgatcggctaccgctttatccatagcctcaaccgcatcggcacctgggtgatgggcagcgcgctgctggccggtttcatctacatcttcgcccatgacctgccggcggacttcctcacccgtggcggcttcaatgccgctggctggttggccacggtgtcgctcggtgttatctggcagatcagtttttcgccctacaccagcgactactcacgctacctgccggcggatatcggcattacccggccgttcatcgcgacctacctgggcgcgaccctcggcaccatgttgtccttcgccttcggcctggtggcggcactggccacgcccgaaggcaccgaagccatggtcgcggtcaagcaggccacaggctggctcggcccgatcctgatggtgctgttcctgctcaacatcatcagccacaacgccttgaatctgtatggcgcggtgctatcgatcatcacctcgatccagaccttcgccagccagtggacgccgagcatcaaggtgcgcgtggtgctgtccggcgtgattctcgcgggctgctgcgtggtggcgctgggtgcgtcggcggacttcatctcgcagttcatcggcctaatcctcgcgctgctgctggtgctggtgccgtgggcgtcgatcaacctgatcgacttctacgtgatcaagcgcggggtgtacgacattgcctcgatcttccaggcggacggcggtgtttacgggcgcttcaatctgcacgcaatcgtggcgtatttcatcggcatcctcgtgcaactgccgtttgccaatacgtcgctgtacgtggggccgtgggccaacctggtggacggcgcagacctgtcgtggctggtggggttggtagtgacgtgtccgttgtattactgcttggcgacgcgccagcagacgcagcgggtcaagttggtgaacgtgggttacaccgactaatcctcgtgacggcaaaagtgcccggccatgtgccgggtatttttttgcctgcaatgttcgggtgttgcgcaggcgaaaaaaggccgccacaacccgacgttgtggcggcccaaggggtgactcagtgcgcgccggcggccttgttcagatcgctttcagcccattcggtatacacacacgcatccgccgtggcccagcgcacccgcaccgggtcgccggccttgagtggcatgccggcggcggacagtgccttgaccgtcatcgaggtgccgccgagggtttttacgctgcaggtctggctttcgccgaggaacaatacctcgccgacgatggcggacacttcgttccaaccggctgccaagggttcaaggtcagcctgcgccacgctcagcgccagggccttttccgggcgcaccatcagcagcacatcctgttcgctgcgtagcccgctggtcaggcggatcgacagcgattgtccttcgaacgacgccgccccattgccttgggccttgagcttgaggaagttggagttgcccaggaaagacgcgacaaacgcattcggcgggttctggtacaggtcgaaaccgctgcccaggccgacgatcttgccgtggctgaaaatcgcaatgcgctgggacaaacgcatggcttcttcctgatcgtgggtcacgtagacgatggtgatgcccaggcgccggtgcagctggcgcagttcgtcttgcaggtcctcacgcagctttttgtcgagggcgccgaggggttcgtccatcagcaggatgcgcggttcgtacaccagcgctcgggcgatggccacgcgttgctgctggccgccggagagttgcgaagggcggcggtgggcgaacggttccagttgcaccagcttgagcatggcgtcgacgcgcttttcacgctcggcgctggccagtttgcggatcgccagggggaaggcgatgttgtcgcgcaccgataaatgcgggaacagcgagtagcgctggaacaccatgccgatgtcacgcttgtgcggcggcacgttgaccagggattggccgcccaccaggatctcgccgctgctgggggtttcaaacccggcgagcatcgacagggtggtgcttttgcccgagccgctggagccgaggaaggtgaggaattcgccgtcctggatgtccagcgagatgttgtccacggcggcgaattcgccgtagtacttgttcaggttgcgcaggctgaccaggggttggccagggttgcgagtggggtctttgatcacggcactcatgggttaatcctcggcgttcaagcgcgggtttcagtgcgtcgacgggcgacggcggcaatcaccatgaccagcaccgacaggccgatcagcagcgtcgacgcgacggcgatcaccggcgtcaggtcctggcgcagggtggtccacattttcacgggtagggtttgcagggtcgggctggccatcatcacgctgagcaccacttcgtcccaggaaaccaggaaggcaaacagtgcaccggcgaccatgccggggcggatcgccggaaaggtcaccttgaacaccgcttgcaagcgcgacgcgccgcagatcaccgcggcatcttcaatcgactggtcgaacagcttcagtgagttgatgatcgagatgatggtgaacggcaaggcgacgatcacatggctgaccacaaacgcgaacatcgtgccggtgtagccgagcttgagaaacagcgcgtacaccgccacggcgatgatcaccagcggcacgatcatcggcagggtgaacaggccgtagagcaactcgcggccggggaagcgcccgcgcaccagggcaaacgcggtgggcaggcccagggcaacggcgaacacggtggtcagcaccgccaccttgaggctggccatggcggcgttcatccagtcggcattggagaagaactggccgtaccatttcagggtccagcccggtggcgggaacaccagccattgggatgagccgaacgacagcaacacgataaacacgatcggcagcaacaggaacaagccgatcagcccggtggtggtatagaggcccaagcgcatcctgcggctcatggcattgggagtcaggagcatgacggcttacctcgcgttgctggcgccaaccggggattccggctggagcttcaggtagaagtagaacagcaccagcgtgatgaagatcagcagcgccgcgccggcactggccaggccccaattgaggaacgattgcacctgttggatgatgaactcgggcagcatcatgttctgcgcaccgccgagcaacgccggggtaacgtagtaacccagggacatcacgaacaccatcaacccaccggaaaacagccccggccggcacagcggcaggaacacccggaagaagttggtccaggggctcgcgccgcagatcgagccggcctgcaggatcatcgggtcgatggcctgcatggtcgcctgcaacggcagcacgatgaacggaatcatgatgtagctcatgccgatcaccacgccggtgaggttgtgcaccatctccagcggctgatcgatgatgcccatggccatcaacgccttgttgattacgccggaggcctgcaacagcaccagccaggaataggtgcgggcgagcaggctggtccacatcgacagcagtacgatactcaggatccaccggccccagccacgcggcaccagggtaatgacccaggccaacggaaagcccagcagcaggctgaacagcgtcaccaggccggcaacggaaaacgtattgagcaacacccgcgcgtacgccgagttggcgaacagttgctcatagttgcccaggcctggcaccggctccagcaccccgcgcagcaacaggccgatcagcggagcgaggaagaacagacccaggaacagcagggccgggatcaggttgctcgacccccgccagcgttgcgccagggacggtgtcccgacgttgcgggaaagcgcgccggcagcgccgagggcgctcccggtcggtgtggttgccgccattttcatttgactagccattcattccaccgtgtcgcaatggccgggccgttcttggcccagtaggcgaaatcgagggtgatctggtccttggcatacgccgtcggcaggttgggcgcaaggaccgaatccaggcgctgtacgctgtcgatgttcaccggtgcataagcggtcaggttggagaagtcggcctggcccttggcgctgctggcactggccaggaacttcatcgcggcggccttgttcttggtgcctttgggcacgaccaggatgtcggccattaccaggttctgtttccagctcacgcccaccggtgcgccgtcttcctgcaaggcgtggatgcggccgttccagaactggcccatgctgacttcgccggaggccagcaactgttgcgattgcgcgccgccgccccaccagacgatgtcttgcttgatggtgtcgagtttcttgaaggcgcggtccaggtccagcgggtagagcttgtcggcggggacgccgtccgccagcagggccagttcgagcacgccggggcttggccatttgtaaagggcgcgtttgccggggtaggtcttggtgtcgaacagcgcggtccagtcctgaggcttgccggcgccgagcttgccttcgttgtagccgagtacgaaggagaagaagaacgagccgacgccgtggtcggagacaaagcgcgggtcgatcttgtcgcgctggatcaccgagaaatccaggggttcgagcagcccttcggcggcggcgcgcaaggcaaagtcggcctccacatccaccacgtcccactgcacgttgccgctctcgaccatggccttgagtttgccgtagtcagtggggccatcctggaccacggtgataccgctggctttgctgaacgggtcggcccaggcctgcttctgtgcgtcctgggtgctgccaccccaactgacgaagttgacgctttcggccgccatggcggcatgactggcggtggccagcaaacccgcgaacaggactgcgctgatacgtgtgttcaacaccatttttacgccctcattgttgtgtttatgagcggggcttttgagtgcccgcctatcgggagcagtcggtgtggatggcctttgcagggtcatccaacctgtggaatatcatattatggtattccaaactttgcgcaagcattttgccataccggccatctggccaaggtcattcaacgaacggaatactctccaccacttccaggtcgtagccggtcaagcccgcgtatttcagcggtgggccgaggtggcgcagcaggcccacgccgaggtcctggagaatttgtgcaccggtgcccacttccgagtaaatccgcgactgcgagcgattgaattggcgcggtgcctgggtcagttgcggcacgcgctccagcagcgcctgggacgactcatgattggccagcaccaccaccacgccgctgccttcagccgcgacgcgttgcaaggcggcccacaaggtccagttggacgggccgctgtagtcggcgccaaccaggtcgcgcagcgggtcgatcacatgcacgcgcaccagtgccggcgtgtcgcggcgcagctggcccatgaccatcgccatgtgcacgccgccgtcgatgcggtcttcgaaggtaatcaggcggaaggtgccgtgcaccgtgggcaggtcgcgttcgccgatacgcaccacggtgcgttcggtgctgaggcggtagtggatcaggtcggcgatggtgccgatcttgatgccgtgcttgcgcgcaaacacctccaggtccgggcggcgcgccatggtgccgtcatcgttcatcacctcgacgatcaccgaggccggggtgtgcccggccaggcgcgccaggtcgcaaccggcttcggtgtggccggcgcgggtcagcacgccgccgtccttggcgcgcaacgggaaaatatgccccggttgcacgatatcggcagggccggcgtcgagtgccacggcggccgccaccgtgcgcgcacggtcggcggcagagatcccggtggtcacgccggtggccgcttcgatggacacggtaaacgcagtgctgaacacgctgccattgctcggcaccatctgttccaggcccaggcgctggcaatgttcatcggtcagggtcaggcagatcaggccacgggcttcgcgggccatgaaactgatagtctcggcggtgcagcacgccgcaggcaacaataggtcgccttcgttttcccgatcttcgtcgtccaccaggagcaccatcttgccctggcgatagtcttcgatgatgtctgcgatgctgttgaaggacatggaggatgctcggcttgttggttgtatgtattatggtataccacaaaaattcaataagaggatgtgcgatgaaggcctactggattgcccacgtggatgtggcggatgccgagcaatacacgcaatacaccagacgtgcgccggcggcgtttgcgaagtttggcgggcggtttctggccaggggcgggcgcagtgtcgcgctggaaggcggaccggcacggcagcgcaatgtggtgattgagtttgatagctacgagcaggcggtggcgtgttatgagtctgccgaatatcaggaggcgaaggcgcaccgtgaaggggcaggggtggcgcagatcatcatcgttgaagggctggcaccctagatgatcaggccagacgttgggttaaatgtgggagggggcttgcccccgataacagtgtgtcagccactggataaggtgactgaaccaccaccatcgcgggcaagcccccgcccacattggaaccctgtttggtcgagaggtcagcggatgaagtggatcttgccgctgtcgtcattgccgatatagatgccatacaccccggcctgccgctcctcgatataacgttctaggatctgccggatcgccggatagtaaatgctgtcccagggaatctcctcaggcgcaaagaacttataatccagcgtctccggcccgaactgcccggtaatctccagcgcaatcgcgcggaagatgatgtacacctcgctgatcctgggcacgctgaagatcgagtagggcgagacgatttccgcgcgcacgccgctttcttcccagacttcccgcagcgcggcctgttcggtggtctcgccactttccatgaagccggccggcagggtccaggtgcccgggcgaggcgggattgcccgttggcacaacagatacttgccgtcctgctcgatgatgcagccggcgatgatcttggggttgatgtagtggatatagccgcagccccggcacatcaggcgctcatgggtatcgcccggtggcaactggtgaccgaggtcactgctgccgcaggtcgggcaaaagcgcgggctgggcatggtcagtggcctatgcgcggttctttgagggcgatgggcagggtgatctcgggcagcttgccggtctcttcctgtttgcgcttgaggtagtccagggccacggcagcggcggcgcgcacgtgatcgacgcaggcctggtgcgcggcaagcgggtcgccactcttgatcgcctggaccatgcgttccatttcctggttactgctggcgcggcggttttcctgggacaccgaggtggcgcgcaggtagctgatacgggcctgcaactggcgcaactgggtcgctgcgacatggttgccggagccttccagcagcacatcgtagaacccttgcaccgaatcgatgacctgttgcagttcgccgtccttgagggccttgcggttctcctccagggctttttccagggccttgatgtccttggccttggcgcgcagggtgaacagctgcacgatcaggccttcgagcacgcaacgcagttcatagatgtcgaccgcatcggccagggtgatgatcgccacctgcgggcccttggcatcggcgaattccaccaggccttcggattccaggtgacgcaaggcttcgcgcaccgaggtgcggctgacgccgaggcggtcgcacaggtcgcgctccaccaggcggtcgcccggcaacaactggaagttcatgatggcgctgcgcagtttctccagcacgatttcccgcagggtgaccgggttgtgattgaccttgaagctgtcgtcgagtggcaggcgtttcatgggggctgctctgtatgtaacggttaacagggggccgatcaggggccgaaattgtcggcgagtttatcacgcggtgtcctttaagcgacaaaccctcacggcccccagcctgcctcaggccaaggccggcaatggccccagcttgcccttgtggtagatcatcggcgtgaccggttgtgcgggcaggatcaggttcttcaccgcaccgacgatgatcgcatggtcaccaccgtcgtattcgcgccacagctcgcactcgatgatcgccgtggccttggccagcagcgggttgcccaggtcgctgaggtgccactcgatgcccttggccttttccttgcccttgccggcaaaggcgtaggcttcggcggtctggtcggcggacagcaggtggatcgcaaaacgcttgctgtcgcgcaggatcgggtaagtgtccgaggcatagttggggcagaacagcaccagcgccgggtcaatcgacagcgcactgaacgcgctggcggtgatgccgacgatgccgccgtccgggtcgagggtggtgaccaccgtgacgccggacgggaaggagctcatgacgtctttgtaaatgccgggttcgatcatggtcggggtctcttagcgcatcacaaaaggatcaggcatgggcgcctgggacaggttgatccacaccgttttcagctcggtgtaggccagtaccgaatctatgccgctctcgcgtccgtagccgctgttcttgaagccgccgatcggcgccatcgcggacacggcacggtaggtgttgacccagatgatccccgagcgcacgtcccgggccaggcgatgggcgcggccgaggtcgcgggtccagatgccggcggcgaggccgaactgcgagtcgttggcaatggccagcgcttcggcttcatccttgaagcggatcaccgaggcgaccgggccgaacacttcttcctgcatgatcttcatcgaattgcggtcgcattcgaacagcgtcggctcgtagaaccagccttcgcccaggccctgtgggcgcttgccgccggtgcgcaggcgcgcgccttcggcaattgcgtccgccaccaggccttcgaccacggcaagttgctgcgcggtggccatgggccccatttcgctggcgtcatcctgcgggttgccgatgcggatgcgctgggcacgtgccaccaggcgttcaacgaattcgtcgtagatttcgtcctgcaccaacaggcgtgaacccgatacgcaactctgcccggacgcggcataaatgccggcaatcgcgccgttgatggcgctgtccaggtccgcatcggcaaagatgatgttcggcgacttgccgcccagttccagggacagcttggcgaagttctccgcgctgctgcgcaccacatggcgcgccgtggccgcgccgccggtgaaggcgatcttgcgcaccagcgggtggcgggtgagggcggcgccggtgctcgggccgtagccggtgaccacgttgaccacgcccgccgggataccggcttcgagggccaggcgcgccagttcgaggatggtcgccgaggcgtgttccgacggtttgatcacgatggtgttgcctgcggccagcgctggcgcgagtttgatcgcagtcaggtacagcgggctgttccacggaatgatcgcggcgaccacgcccatggcttcgtgcacggtgtaggcgaacaggtccggcttgtccagcggcagggtgccgccttcgagcttgtcggccaggccggcggtgtagtggaagaactccggcaggtagctgacctggccacgggtttcgcggatcaacttgccgttgtcgcggctttccagctgggccagttgttccttgttctcggcgatcaggtcgcccaggcggcgcagcagtttgccccgtgcggtggcggtgaggccgcgccaggccgggctgtcgaaggcggtttgcgcggcctgtacggcgcgctccacatccgcttcgtcggcgtcaggcagttgcgcccagggttcggccagggccgggttgaggctgtcgaaagtcttgccggacagggcatcgacccattcaccgccgatgcacatctggaagcgtgcgagtgtcatgcaacgatcccctttattggattgttttgggcgtacacggtctctagaaaacccagcagcaactggttgaccaggcgcggcgattctaccggcatcatatgccgttgttcggccagcaccgcaacggtggcgccggggatgcgatcggccagttggcgcgccatctccggcgtcgaaccggggtcgagttcgccggtggcaaccagggtgggggcgcgcagcgtcttgaggtcgtcggcgcggtacatgtcctgggtggcaaacagctcatacgtggtgaggtaaccctggggatcattgcccgccagggtttcgcgcaaggccgcgatctgcgccgggttggccgcctggtactcgcggctgaaccagcgtgacagcgccgcctcggcgttggcgtccggcccgtgttcggcggcctgggcggtgcgcgcgatcacgccggcgcgctgttccgggctgcggttgaacacactgttgagcaccaccaggcccttgaggcgttcggggtagtgcagggcaaacgcccgtgcgaccagaccgcccatggaaaaaccgattaccgtggcctggggcacttgcagatggtcgagcagttccagcagctggtcggcataccccagcaacggcgtgccggaggccgggcgcgggctggcgccgtggccgagcatgtcgtaggtgatcacgcggtagtgcgtggccaggccaacgacttgcccgccccacatttctttattcaggcccacgccgtggatcaaaaccacaggctggccttggccggtcgccagataactggtgccagccggggtgcgttcagcggtgagccgaatcatggagcgctcctgcatgccttttcttattgggggtgccggcctggcttactgagccttttcggcagccagttcttccaggtcgatgtaacggttgccgatgcgtgggtgcaggcggccgccatcggcgcaacccagtaccacgacgatttcgtcggcacgcggggcatcttcgatgcgcatttccagggtgatgtagtgcgagcgcaggccttcgtcatccttgtgcatcatcgggacctggatggaagtgcccgggccgccgcgcttgttggtgaagctcaggtagctcttggctttgaccgcttcacggtagtgattgccgaagcgcagggtgtggatgatcgcgctggcgtgctcgatctcgccatcggcaccgaccacggcagctttgccataggcttcgatcttgtcggcaccgccaatgatgcccaccaggcgctcgaccatcagcgccccgaggtcggagcagttggcacggatttccggcttcaggtcttcgacgaaaccacggcccagccatgggtttttcagcaccacggccaggccgaccatggtcaccggggtatcagcggccttgccgccttcgatgaaggtttcttctgtgtagctgacgatcttgcggatttcgaaactcatgagcggctccatcaggtgtgggggagtgggttgcgtatgatggtataccataatacgcaaagcacaagcgtcgcgaatgagtttgcgtggggtgaggcgatagagggtggtgtatgaaggtcttttcgaggtgatgttaaaaaatgttagattgaaaaaatacttcacataatctgttcattggtggatgatcggccccaattccaatgcggctcgccggtgtggtgtcagccgccgttttcccctggagtacctatgaataataagaatgtcggtgtgatcggtttgggcgcgatggggctgggcattgcccgctcgctgttgcgcgctggtttcagtgtgcatgcctgtgatgtacgtgaggcagtcacccggcagttcgccggggaaggcggagtggcgtgctcgtcaccggcgcagatggccgaggcctgtgatgtgatcatcaccgtggtggtcaacgccgagcagaccgagactgtgctgtttggtacgggcggtgccgtggcggcgctgcgccctgcgagcctggtgatcggttgcgccaccgtggccccgacctacgccgtggacctcggccggcggctgggcgaacacgggctgctgtacctggatgcgccgatttccggcggtgcggccaaggccgccgccggtgagatgaccatgatgacctcaggcccaaaggccgcctatgccaaggctgatgcggtgctggcgggcatggccggcaaggtttatcgcctgggcgacgtccatggactcggctccaaggtcaagatcatcaaccagttgcttgccggcgtgcatatcgcggcgtctgccgaggccatggccctgggcctgcgtgaaggggtggatgccgatgccttgtacgaggtgatcacccacagcgccggcaattcctggatgttcgaaaatcgtgtgccgcacatcctcaaggccgactacacgccactgtcggcggtggatattttcgttaaggacctcggcctggtgctggataccgcccgtgccagcaagttcccactgccgctgtcggccactgcgcaccagatgttcatgcaggcctccagcgccggttttggccgcgaggacgactcggcggtgatcaagattttccccggtatcgagttgccgactgccaagcccgaaccggtgtaaggaacattttatgactgaccacaccacacgcccgttgctgggttgcattgccgacgatttcaccggtgccaccgacctggccaacatgttggtgcgcggcggcatgcgcacggtgcagagcattggcatccccagccgagaagttgcagacggcctggatgcagatgccattgtcatcgccctcaagtcgcgcaccacgccggccgcagacgctgtcgaggaatccctggccgcactggaatggctgcgcgcgcagggctgcgaacagattttcttcaagtattgctcaacgttcgactctaccgccgccggcaatataggccaggtcagtgaggccttgctcaaggcgctcgatgctgatttcaccctggcctgcccggcgttcccggaaaacggtcgcacgattttccgtggccacttgttcgtgcaggaccagttgctcaatgaatcgggtatgcagcatcacccgctgacacccatgtgcgacgctaatctggtgcgggtgctgcaaaaccagactgcattgccggttgggctcctgcggtacgacgcggtcgccgccggtgtggacgcgacacgcaccaggatcgccgaactgcgcgagcaaggcgtgggcattgccatcgccgatgcgctgtcggaccaggacctctataccctgggcagcgcctgcgccgacttgccgctgctcactggcggctcgggcctggccctgggcctgccgggcaatttccgccgcgcgggtaaattgcgcgattttgatgtgaatgcattgcccacggtcagggggggcgaggtggtgctggccggtagtgcgtcggtggcgacccttggacaagttgcagcctggtgcgaggcgggccgcccggcattacgcatcgatcccatcgccctggccgccggtgaaccggtggtggcgcgggcgctggcctttgctcgcaacagtgcgcacaccgtattgatctacgccaccagcaccccggccgaggtcaaggcggtgcagcaacaactgggcgtcgaacgtgccggcaccctggtagagaacgcattgggcgagctcgctgccggcctgcgtgagcagggagtgcgacgctttgtagtcgccggaggggaaacctccggtgcggtggtcaaggccctcggcgtcagcctgttgcagattggtgcacagatcgaccccggtgtgccggccacgctcagcagttccgccgaaccgctggcactggcactgaaatcgggcaacttcggggggcgcgagttctttgccaaggcccttgtgcacctggcaggaggtgcccaatgactggcatcgacgaacaggccctgcgcgaagagatctgcgatgtcggccatagcctgtatcaacgtggctataccgtcggcagcgccggcaatatcagtgcgcgcctggatgatggctggttgattacgcctaccgacgtctgtctggggcgtcttgcacctggggcgattgccaaggtcaacctggaaggcgagtgggtgtccggggacaaaccttcgaagaccctggccctgcaccgtcaggtgtatgaccgcaatccctcggtgggcggggtggtgcatacccattcgacctacctggtggcgttgaccctggccggggtgtggcagccagacgctattctgccgccgctcacgccctatcaagtgatgaaggtcgggcacattcctttgatcgactaccagcgtccgggctcgcccaccgtcgccgagcaagtggcgcaactggccaacagcgtgcgtggggtgatgcttgaacgactggggccggtggtctgggaaagctcggtggccaaggccagttacgccctggaagagttggaagaaaccgccaggctctggctgatgagcaacccccggcccgagccgctgagtcgggccgccttggatgaattacgcgagacgttcggcgcgcactggtaagccgtagatcgatattgcaagcctcccgcgagacccgcctgcggatcgtgacggggggcggcttgcaccaaaaaacaataacaacaggacattcccgaatgagcccactgattttgatgttgaccgccggcgcgggtatcgcgctgctgctgtttctggtcctcaagtacaaattccagccctttgtcgcactgatgctggtcagtattgtggtggcgctggtggccggggtgaaaccggctgatctggtggcgacgattgaaggtggcatgggcaagacccttggtcatatcgcgatcatcattgccttgggcgcgatgatcgggcggatcatcgagctgtccggcggcgccgaagccttggccaagtcgctgatcgagcgcttcggcaacagccgtacgccgctggctttgaccattgccggattcatcatcggcgtgccggtgttctttgaagtcggggtgattatcctgatgccgctggcctacggtgtggcacgccgggcacgcaagccgctgctggtgtttgcgctgccgatgtgtgcggcactgctcacggtacatgcgttcctgccgcctcatccgggtgcggtggcggcggccagccaactgggtgcggacctgggccgggtgctgatgttcggcctgccgatcaccgctttgctgtgttacgtcggctaccgcgtggcggcgcgcatgactcgccgcttttatccgatgaccgatgacattcgcgccgaagtctatggcccccatgtgaccaatgaagacttgcgggcctggaccagcggcagcaaccaggccgcgcaacagaacgccgtggccgaatcccacatgggcctggaggagtccaccagtgccatcgccgccaagttgcctgcggcgcctgcgccggggttcgggctgatcgtcagcctgatcctgctgccgattgtgttgattctactgggcaccctggctacatcattgcttacgatagagtcgacgttgcgcgccgtgatgaccgtgcttggcgcaccattggtggcgctgttgatcgacaccttgctgtgtgcctggctgctgggctcgcgtcggggctggagccgcagccaggtgtcggatgtcatcggctccgccttgccgggcgtggccatggtgatcctgatcgccggcgctggtggggtgttcggcaaagtgttggtggacaccgggatcggcgcagtcgtgtccgatatgttgcgcaccaccggtctgccggtgctggccctgggcttcctgttgaccatgctgctgcgcgcggtgcagggttctacgaccgtggccctggtgactaccgcaggaatcatcagcccgctgattgccaccctcaacctcacgcctaaccatatggcgctgctgtgcctggccatgggcggtggcgggctggcgatgtcccatatcaacgatgcaggctattggatcttcaccaagctggccgggctgaatgtggcagacggtctgcgtacctggacagtcatcaccacgttgctcggcaccctggggttcctgatgaccctgctgatctggccatttgtctgatttctaggagcttacatgcctcgttttgctgccaacctgagcatgctgtacccgcaatatgatttcctcgagcgcttcgctgcggcgaaagccgatggttttgatgccgtggaatacctgttcccctacgattacagcgccgccaccctcaagcagcgcttgagtgataacggtctggtccaagtgttgttcaatgcaccgccgggtgactgggcggcgggtgagcgaggcattgccaccttgccggggcgcgaggccgagtttcgcagcggcttcgaccgtgccctggaatacgccgcggtgctgggcaatacccgtgtgcatgtgatggcggggctgttgccgtcgccaagcctgcgcgaacgccatcacgccgtgtacctggagaacctggcctatgcaagcgctgcggcggccgaggttggcgtgacggtgttggtggagccgatcaacccccgtgacataccgggcttctttctcaatcgccaggaccaggcccaggcgatctgtcgtgaagtcggcgcaagcaacctcaaggtgcagttcgactgctatcactgtcagattgtcgaaggcgatgtggcgaccaagctgcgtcgtgacgtcgacggcatcggtcatatccagattgccggagtgcccgaccgccacgagccggacctgggtgagctgaactatgggttcctgttcgagctgatggaccagttgggctacaccggttgggtcggctgcgaataccggcccaaagccgatacctcggctggcctgcaatggttgcgggactggaaggcccgctgatccgaaacatcccctgcataaccggtaagcaggggggccacaataaaaacaaaaataacgggagttcccctatgcagcacttcaccgtccggcctgctccaggctggctgtttgcgttgtcttgtgtaccttcgatgctctgcgctgcaccattgccatcggcgacggagggcgattgggtcgcgcccgagttcacttttcacacgggtgaaaagctgaccaacctgaaattgcattacctgacgctgggcgatccggctcacccggcggtcctgtatctgcacggcacgtatcgacctggcagcgacgtgctgggcaaggatttcggcggtgagttgttcgggcctggccagccgctggacgccagcaagtactacattatttccaccgatggcataggggtcggccagtcgacgaaaccgtcggatgggctgcgcgccacgtttcccgcctacaactatgccgatatggtccaggcgcagtatcgactggtgaccgagggcctgggggtcaagcacctgcgcctggtcatcggtaattccatgggcggcatgcagacctggatgtggggccagacctggcctcagatgatggatggtctggtgcccatggcatcgcagcccacacagatgtcatcacgcaactggatgatgcgtcggctgctggtggagtcgatcaggcaggaccctgcgtggaatagcggcaattacacccagcagccgccttcgttacgtctggccaatgcgctattcagtgtaggcaccagtggcggcaccctggcttaccaggcggctgcgccgagcagagcgctggccgacaagctggtggacgagcgcctcaacgctgcgcaaacggctgacgccaacgactttatctaccaatggcaatcgtctgccgattacaacgctgcccccgggctgggcaatatccaggccccggtactggcgatcaattcggcggatgacgagcgcaatccgcccgaaaccggcactctggaggcgtccctgaaacacatcaaggacgcgcgtttgctgctgatcccggccagcgctgagacgcgcggccatggcactacggcgatggcgaagttctacacccgggagttggcggcgttcatgcaacacaccgagcaggtacgccaggcgcgttaacacgccgtcgggtcacgccggcgttggatcgcccggcagcatcagttcgatgccgcgcttgcggataccgtcagcggccgccggggccagggcgtcgtcgctgatgatcacatcgaacggttccagcccggcgatgcggtacatgctgaaggtgccgtacttggaactgctggccaccagtactacttgagcagctgattgcatcgccacttgcttgacctcgaccttcagcgccgagggggtggtgatgccacggtgcaggtcccaggaactggtggacacaaaagcgatatccgtgaccacctggcgcaaagtcgccaccgccagcccgccgacgcaagagtgattgtcatggtccagttggccaccggtgtggatcaccgtgacctggggcgcatccatcagggcctgcacgatcccgaaatcgttggtgaccaccgtcatccccgaaagcgccttgatataggggacgatctccagggtgctggtgccggcatccaggtacaccgtcatgtccgcgtgcagcaaacgtgctgccagtcgtgccatcgcctgcttttgtggcaattccactacggctttggattgatggctcggctcgctgtgcaactggctggcgatcctgacgcccccggtgacggagtacgcccggccttcctgttccagcagtgcaatgtcacggcgtacggtcatgtgcgagcagtcgaacatctccatcaactggtgcacgctcatcacctgatgcttgcgcaactgacgcaggatttgctcgcgacgctgctcgggaatcatcggcgtgctgctgtcgggggcagtgtccttgggggtgggcattgaggctccgggtcggtctgggggctggggcacatagtagcgaatatgcgttccgaggtgatgcacttcagtcagtcatcagtgcgtcatcgactgtgtccaggtgcttgaagcgttcgatcagaaagtcaatcaggctgcgcacccgtgccgacaggtgcagttgttgcgggtataccgcgtacacatcggcgcgggtgggggtctggtcctccagtaccaggcgcaggcgcccgctgcgcacgtagcgagcgatgtcccattcggcgcgcagtagaatcccgtagccctccagtgcccagttcagcgccacctcgccgtcgttgcagcccagggcgccgtgcactttgatgttgtccgtatgcccgccgtgggtgaacgaccacacgccatacggcgattcgttctgacggatgaagatgcagttgtgctggtgcaggtcggcgagcttttcgggtgtgccgtatttgtccaggtacagcggcgaagcgcacagcaggcggcggttggaggcgatcttgcgtgcatggaacgccgcgtccggcaggctgccgaagcggatgccgaggtcgaaaccgtgggtcgtcaagtccagcgggtgatcgctgatttccagctggatttcgacctccgggtactgcgcaaaaaacgctgccagggccgggccgatataacggcggccgaaccccagcgaggcattcacccgaatcaggcccttgggcgtggcgcgactgctgctgagcacctgctccagttcgtcgatctgggtgaggatgcgcgccgcatgggtgaaatacagctcaccttcggaagtcaggctcatcgagcgggtagtgcggttgaccaggcgaatgcccaggcgcgcctccagtgccgtcaggcgtttgctcactgccggcggagtcacccccagttcgcgcgcggtggcgaccaagctgcctttgttggcgagcaggtagaaaaacgacaaatccagggtttggctcattcgtaactcaaggttatttatgtagtgatttcgagtcgatcatgctgctttgatcgctacatatactccgatcaccccccgcttggacagcctggctgcggcgggacacaacaacaaacgtgacgaagcggagtgaatgatgagtgcatacaacattgcggcaattccaggagacggtatcggcgttgaagtgatcgccgcgggcgttgaagtcctgcaaagcctcgcgaacaaagccggctttgcaatgaacttcaagcatttcgagtggaactccgacaactacctgaaaaacggctactacatccctgaggggggcctggaagagctgaagaccttcgacgcaattttcttcggtgcagtgggggccttgaacgtgccggaccacatctccctgtggggcctgcgcctgccgatctgccaaggcttcgaccaatacgccaacgtgcgcccggcgcgggtgttgccgggggtgaaaagcccgttgcacaacggcgaccagattgattgggtggtggtacgggaaaactccgaaggcgagtactccggcaacggcgggcgggtgcatcgcggcttgcccgaagaggtggccactgaagtgtcggtgttcacccgtgccggtgtggagcgtattcatcgttttgccttcgacctggcccgcagtcgcccccgcaagcatctgaccctggtcaccaagtccaatgcccagcgtcacggcatggtgctgtgggatgagattttctacgaagtggccaaggacttcccggatgtgaaaatcgacaaggaactggtcgacgccgtgaccacgcgcatggtgctcaaaccgtcgaccctggatgtgattgtggccaccaacctgcacgctgacatcctttccgacctcgccgccgcactgtccggcagcctgggtattgcgcccacggccaacctcaacccttcgcgccggttcccgtcgatgttcgagccgatccatggttcggcgttcgacatcaccggtaaaggcgtggccaaccccatcgcgacattctggaccgccgccatgatgctcgaacacctgggcgagccagccgccgcccggcaattgatgtcagccatcgaggcggtcaccgaaagcggcctgcacacccctgacctgggtggcactgccagcacccgccagatcaccgatgccgtcatcgagctgatcaaccgctgattcacgggagtactgcggcacaacgccaagggccggcggtcacgtccgcccccctggcatttcctgacaacaataagaatcagggccctgtcatgaaaagaatatttggcaaactctatgtgcaagtcctcatcgcagtcatcctcggtgcgattgtcggggtgcttgtgcccgacaccgggaccgcgctcaagccattgggcgatgcatttatcaaactgatcaagatgctcctggcaccggtgatcttccttacggtggtcaccggcattgccaagatggagaacatgaaagagctgggccgcgtgggttttcgcgcgttgatctacttcgaagtggtatccaccctggccctggtggtcgggctggtggtggtggatgtgttcaagcccggcgccggcatgaacatcgatgtggccaccctcgacacctcaagccttgccacctacaccacggcggtcaagcacgcctcgttcatggactttgtcatgaacatcattcccgacaccctggtggatgcgtttgccaagggcaatgtgctgcaaatcctgctgttttctatcctgctgggcgttgcgctggctgctgtggggccgcgcggtaagccattcgtggacacgctggacagcctcatgcagggcatgtttcgtatcgtcaacatggtcatgcgcctggcgcctatcggtgcgtttggcgccatcgcgttcaccatcggcaagtacggcttcggttcgttgttttccctcggcaaactgatggcctgtgtctacctgacgtgcgcggtgtttgtgatcttcgtgctggggccgatttgccgctacagcggcttcagtttgtggaagttcctcaagttcatcaaggaagagctgttcaccgtgctcggcaccagctcgtcggagtcggtattgccgcaaatgattgccaagatggagagggccggggtgtccaaaccggtggccggcatgatcatcccctcgggcctgaccttcaaccccgacggccaggcgatctactacaccatcgccgcgattttcatcgcccaggccaccaacacaccgttgaacctaactgatcagttgatcgtgctggcggtgttgatgttcacctcaaagggctcggcgggagtgaccggctcaggctttattatcctggcggcaacgctgtcgtcactgggcactattccggtggcgggcatggtgctgctattgggggtagaccgttttatgtcggaagcgcgggcgatcaccaacaccatcggcaatggcgtgggcaccatggcgatcgccaagtgggtgggggcgttggatacggtgaaaatgcgcaaggccctcgacggtgaagttgagagcccaggtgcacattcagaacttgaatcgccccaccagccccttgagctgcccggaaatatccgtcaaccgacctgacccggtctgcgccgaatgggcaaacccttcgaccagttgcgcatcggcatggatttgcgcgatgtgccggttgatctcttcggccacctggtgctgttcttcggcggcggtggcgatctgggtgttctggtcgcggatcgagtccaccgagccacggatcttgtcgaagctgtcgcgggcctgctggatgcgttccacgctggtgtgcgacaccagcaggctgccttgcatctgctgggtcacttcctgggtgcgacgggcgaggttgccgagcaggctgtcgatctcgccggtggagtcggcggtgcgacgggccagggcgcggacttcgtcggcgactaccgcaaagccgcggccctggtcaccggcacgggcggcctcgatggcggcgttgagcgccagcaggttggtctgttcggcaatcgagcggatggtgtcgaggatggtgttgatgtttttgctgtcctgctccagctgctgcatggtctgggtcgagcgttgcaggtcttcgctgagctggagcacgctgccggtggcttcgccgatgtgctgctggccgtcgtgcacatcgcggtagccttcatcggcactggtggcggcggcgctgcaggagcgcgcgacttcgttggcggtggccaccatttcgttgaacgcggtgctgaccagttccaccgcttcacgctggcgaccggcggcctggttcatgttgtgggcgacttcgctggtatcggcggcggcggtttgcaggtcggacgaagcgttgccgatgcgctgcaccaactgggcgatcatgctcaggaactgattgaaccagccggccaggctggcggtttcgtccttgccctgcaccttgagctggcgggtcaggtcgccttcaccttcggcgatctcttgcaggccgtcggccacgccgcgaatcggacgtacgatcacgctggcgaaactggcgccgacaatcgcgaagaccacggccagcgcagcggcaatcgcagcgatcaaccaggtaaggcgggtcgcgccggccatcacttcgtcgcgcttgatcaggccgataaagcgccagcccaggtctttggagctgaccatgttggccatgtaggccacgccatcgatgtcgatctggctcacgccgtcgccgcgcttggccagttcggcgtagttggggccaaggtcggccaggggcttgaagttgtgcttggcgtcgctggggtctaccagcacgttgccgttgccttccaccagcatcaggtagccgctgtcgccgagcttgatgttgcgcaccagttcggtgagctgcttgagcgagacgtccaggccgaccacgccgaggatcttgccggcggcgtcggtgacggtgtgcacggtgccgatcagcgtcacatcgtccggcgcccaatagtaggcgccggtgcgcacggttttacccggcgcggcgatggccgcctggtaccacgggcgtacgcgtgggtcgtagttgttcagcttggtgtcgtcgggccagctggcgtagccgccgtcggcgaggcccagggacaggtaggcggtgctcggatggctcttggcgaactggtcgaaaatctccagcagcgcggtgttggtgggggtgagggggatctgtgcggcgtcggcgccggcgtagctcttgaggtccttggccgcgacaacgcgcgggtccttggccacatactcgacgttctggctgatgccctcgaagaactgcttcatgccattgtcgatctggcggatctcacggccactgctgtcgaggaaattggcctgggccccctcgcgcagattcaacacgaccagcacggccaccaggataaccggcacgcacgcgatggcggcaaatgcccaggtcagcttttgcttgatattcatgacttcacccgcgggtatttataattttggcaaggagaaaacagtagcgtcgagcgtcgcatgtgttgtttttagggggtgtggccatgcgtaccccctgtatatcgactgcgcgggcacgcacttgagggccgagagaaggtttaaccgatgcgttcgccacccagcgcatcacgctgcatcgactgcaggtttttctcgatggtttcgcagatggtgtccatctggatctggtgttcgctggagttgaacgggctttgcaggtcggtgccgatgcgctcgatggccagcagcatgaaacccaccaccgtcgaggccagcggggtgaaccagcccagggactccaccaggcccaccggtacgatcaggcagaacagcgagataaacagccgtgggaagtacacgtaagggtagggcagcggggtgttggcgatccgttccatgccgccctgggcgttggacaagtccaccagggtcgactccagccgtgccaggcgaatgctgtcaaggtgaccgaccttgtactcgcgggccagcaacgccgctgaaccggtaaggatatcgttggcaaagttgttggtggcgccgttgcgcgcaaactcgtcaccagggataaacgcgcggacttcttcggggcaaggctggcccttgaggtgcgcggccaggcaattcacataggccacatgacgacgcagcagggtggccttgaccgggttcacttcgtcgtcggggtcgtccagcagggtcagtacctggcgcgcaaaactgcgcgagttgttgaccatcgcgccccacagtgtgcgggcttcccaccagcggttgtaggcactgctgttacggaaactgatcagcaccaccagcgccgaacccagcagggtcaggggcatcagcggcagattgatcttgtaggtgagaaacaacatgaagtccacggtgacggcgacgtcccacagcagcagccagaacagcgcccagccaacgtagcccatggtcttgatgatcaggcggtactttttgaggatggcggctttcaaacggggacctcgcggcgaacggtaagcaagagtgcttaagctcggacgcgggtggcggtgaaaggttcgccccatggcctgaatcgtttaagtggtgcgcaccggctcccgtgagagtcttcgcagttcttccagtgccgccaggattcaatggcatcggcgaacaggtcgattgaacagtttcatcacaacgcttggatatatttaaaggcagcgaagcaccgcagctgtcatgggcgtgtatgagtgggttgctttagggacgccaatacgttttggaacaattttggtagcgatgatgtctgtcgggttactcgcgatacattgcgctcgaggcaaaacgccatcactggtggtgtttacgacgtgagttgttgtgagacctggttgcagaagtgctgcgccatcgatcagtgaattccagtaggttgatcagggctctttctcatgtgcgtcagttcgttgaagtgggcgttggatcattccgcgcaggtgttggaacgtcacggggaatttgaatgcagtattcgcgcgcactacgccattctgctgggtccctattcaaaacgaccgtttttctacaagacagcgctgaagttcaaccgtttgatggtgtctttcacgctgctgagtgaatatttctccaagcccgcgccattgttgtccgacgtgaaagcgttctgcgtggctcgcggtttctgttccaggaacagcctggagtcgatcttcctgctgttcagggccctggggttcatgaaggtcgctggccaccctgacgacagccgttttcgggtgttcagcccatcgccgcaggcttgccatgaagtcaggtcgatgctcaattccgtggtgcagccgctgggaccaatgtgccccagtgaagcgcaggtccagcggatgagtgagttggacgaccgagccttcctggcactttatttcaaaggttttgccacccttctttcaaataagctgaccatcgatgtattgctgccggaatgtgactggctggttaaccgtgatgccggacatatgctgatgttggcgatttataacgatgcctgttccttggactgtcagggcgcaagtttcaggacgtcttcttatctttcactggcgacgcgactttcagtgtccaagacccatgtgattcgtctggttcaggagggtgttgaaaaaggttgctttaaagtgcattccaagacgcagttggaagtattgccgccctttgtaaagttggtgcgccgtttcatggcgtattcatttgcaatcaccctgcttagtatcgagttgggccaagccaggaaaatataggcaacttatgcgcagggagtgttgagatgccggctgacttaaagctcaggccaaggatgcagaggttattgtcgcccgctgttgcccaggcggaatggataggcctgattgcctggtggtgggtgctcttggtggatccggtgctggagttcgggtggtacaccgtgctcattaccgtctgtttgacagcgttgtgtcgatttcaccggcggttggccaatttcctggcctggcgggcgttcggtgtggtctatatggcggtgttggccgggggctttgcgttggtgatgcagaccgatcaggcgttgcaggtatttgctctaccgctggcggtgattctggtgctgagcagtgccttgctctttatcgcagtccaggatttcttgataggcgctgcattgatctggtcgatgctgtggccagctgttcatatgtcgatctacgccggggttgaggtttacctggtgatgttctgcctggcgtcggtgtcgatcggcttcatcttgaattattcctacttgaagaacctgcgttccgtattgctggtcgagagtgagttccgggaactggcagaaacggattacctgacctccatcctgaaccgacgggcctttatcgagcgtttcgcccaagtgatcgccgacggccagggcggctacttcatgatgttggatatcgatagcttcaagctgaaaaatgaccagtttggccatgatgtcggcgacaagattctctgtgcgatggctcattgcctgaaagccactcctggcagcgacagcttcggtaggatcgggggagaggagttcggtgtcttgctggtgggtgatgacccttgggcggccacggattttgccgcgcgcctgctgcaagccattcgtggcagtgtcccgccaccccatcactacacgtgcagtgccggcatgacgcatttctcggcgggcgccgatatgtcagcggtactcaagtgcgccgaccgcaacctgtacgccgccaagcgcaatggcaaggactgcgtgtacctggatggcgagccggtggctgcttcccggtgaaacgcaaagacgggcctcagtgctgggccagaatgctcgcaagcaagccgggaaagcggccttcaagatcttccgcacgcaacgcattcagatgagtggtgcccacgctgcgtgtctgcaccaacccggcatcgcgcaacacccgaaagtgatgggacatgctcgacttgggccgcccgccgtccagttcgccgcaggtggcctctggcacgccggccaggcagcgcacgatttccaggcgcaccgggtcactcagggcgtacagcacgcgctcaagggtcaggtcttgcaggggggggtgtttgaaggctcgcatgaaacgaatcataacagggggctatcgttgaataccatagttcgattaccatcgaactatcgaatcaaccacctgctcactggagtcgcctcatggccgcattgttcgaaccgttccaactaaaagatgtcaccctgcgcaatcgcatcgctatcccgccgatgtgccaatacatggccgatgacggcatcgtcaacgactggcacctcgtgcacctggccagcatggcccgtggcggcgccggcctggtggtggtcgaagccactgctgtcgcgccggaaggtcgtatcactcccggctgcgcgggcttgtggagtgatgcgcatgcccaggcgttcgtgccgatggtccaggcgatcaaggccgctggttccgtgccgggcatccagatcggccacgccggccgcaaggccagcgccaaccgtccgtgggaaggggatgaccatatcgccgcttccgatgcccgcagttgggaaaccattgcaccgtcggctatcgccttcggcgccaacctgccacaggtgcctcgcgccatgaccctggacgacattgcccgggtgcgccaggacttcgtcgacgccgcccgccgcgcccgcgacgccggttttgaatggatcgagctgcacttcgcacacggctacctcggccagagtttcttctccgaacactccaaccagcgcaccgatgcctacggcggcagcttcgacaaccgcagccggttccttctggaaaccctggccgacgtgcgtgaagtctggccggaaaacctgccgctcaccgcacgtttcggcgtgatcgagtacgacggccgcgacgagcagaccctcaccgaatccatcgaactggcccgccgtttcaaggccggtggcctggacctgctgagcgtcagcgtcggtttcaccatccccgacacccacatcccgtggggcccggcgttcatggggccgattgccgagcgtgtacgtcgcgaagctggtatcccggtcacgtcagcgtggggcttcggcacgccgcaactggcggaaggtgcgttgcaggccgggcacctggacctggtgtcggtggggcgtgcgcacctggccgacccgcattgggcgtattttgcggcgaaggaactgggggtcgagaagtcctcgtggaccttgcctgcgccttacgcgcattggttggaacgttatcgctgaggcggtagccggatgatggaagccactcccaggagtggctttttttttgcgtcgtcttttgtagcacgtcgatacatggcggatactcaaaaaaacatcaatgagaatggatatcaattgttaatgatttgacatatcatgcgcgccaaaataactggctgatatgccgccccatctggctctttcactaggttcaactcatgcgtcgtaccctgctttccgtgtgtgtgcttcaggcgttttcccccttgagctgggcggaggtcgaaccggttgaaaaagccgccatcgagctgcaagccaccagcgtcaccggcacggccgactatgaaaccgcccagggccccgtgcagggctatcacgccacccgttcagcgagtgcgacgcgcaccgacacctcgatccatgaaaccccgcagtccatcagcgtagtgtccaaggcggtggtcgaagacatcggcgccactcgcctgcaggacgcgctggactatgccggcggtgtcggccgcgccaacaacttcggcgggcagggtctcactaccttcaccgtgcgcggctttaccaccggcgagttctaccgcaacggtttcccgatcaaccgtggctacccgaacatgccggatgccaacaccatcgaacgcctggaagtgctgcgcggcccagcgaccatgctctatggccgtggtgatcccggcggcaccttcaacgtggtgaccaagcaaccgttggccgaacgcacggtcaccctcggcagccaattgaatgaccagggcatgaagcgcggcaccctggacgcctccggcccgttggacgaagagggccgcctggcctatcgcctgaacgtggtgggcgagggcggcgacaccttccgcgaccatgtggaaaccgaacgctacggcatcaccccggtgcttacctggcaggccagcgacgacaccaaggtgatcttcgaaggcgacttcatgcgcaacaaccacccgctggaccgggggctgacacgctttgctactcagaaaggcacggcttcccgcgataccttctggggcgataaagacgtcggcaagctgcataacgacaacagcatggcccagttgcgtttcgagcatctgctcaatgacaactggaccctgggcggtggtttccagtggttggacggcaccttgcagggcaacgccatcgaggccaacagcctggctgccgatggccacacgctcaaccgcaacttcaactaccgcaagctggaatggaccgacaaggacacccagctcaacctcaccgggcatttttccacgggtggttttgatcacaccttgctgactggcgtcgagtttgaggattacgactacaagtcgatcatccagcgttcgtccgccgcctacaccagcgatatcttcaacccggtctacggcaagccgcgcccggcgcttaccagcacgccgactcatgacaaggaaaacctcaagacctacgccgcgttcgtccaggaccaggtggccctcaccgaacgcttgaaggtgctggcgggtgcgcgcttcgaacgcttcgagcaccagtacgagacctacgtgaagggcgggcaaagctgggaggccagcgacaacgcggtcacgccccgtgtcggcgtgacctatgacctgactgagaccctggcggtctacgccgacgccgcgcgttccttcaagccgaacaccggcgccagtcgcgacggtgccggtttcgagccggaaaagggcaagtcctatgaaatggggatcaaatgggaagggctggaccgtcagttgagtgtggacgcagcgatctaccagatcgacaagaagaacgtgttgaccaccgatcctgaagactccaactacaaagtcgcagcgggtcaagtgcgcagccgcggcttcgacctcaacgtcgccggcaacctcacccctgaatggcgcgtgatcggcggctacgcctatgtcgacgccgaagtcaccaaagacaacaccatccgcgtcggttcacacctggccaacatcccgcgtaacagcttcagcctgctcaacgtctacgaattccaggacggtcgcctcaaggggctcgggctgggcgcgggcgccaaatacgtcgatgaacgtgtcggccagacctccaacaccgccttctccatggacgcctacaccgtggtagacctgctgggctactacaaggtcaatgacaaggtgcgcctgaacctggatgtgaagaacctgttcaaccgcgattttgaggaaggcgcgttcggcaacttctacgcctacccaggcgcgccacgcacggtgcaggtgggcatcgcctacaccctgtaaaaccggggcggtgtgcaatccctctgggtgattgcacaccgtattcctcagccctcgaacactgggtgcgacgacctttcaatcgccaccatggcatcggcctggctcatcaaccccgactcttccagaatcgacaacagcgagcgcccttgcgccaccgattggcgtgccagcttgctcacacgggcgtagcctagctgcggaaccagcgcggtggccacggccattgattgagccaggtgttgttcgttacgttcggcatcggcggttatcccactgatgcacttctcgcgaaaccgttggatgccttgggtcagcagcgcaatgctgtcgaacacgcgggacgccaccagcggctcgaagtggttgatctccaactgaccggcctggaccgcctgcgccaccgccacatcattgccgatgacggcgaagctcaactggatcatcgccatgggcaacaccgggttgaccttgcctggcatgatcgacgagccggcctgggcttcgggcagcttcaattcgccgatcccaccgaccggcccggaggacagcaaggtcaggtcagttgcgatcttggccagggacgcggaaccggtgcgcaactcagccgaaacccgagaaaacacatccatgttctgcatcgcatcgaaggcgttcgaggggggctggtactcaatgccagtgacctgtaccaagtgctgatacaccgcggcgcgataagcgggaggcgcaccaaacccggtgccgatcgctgtgccgcccagcggcagggtgcgcagtgtgtcgcgcacgccagccagcgcggtcgccaggcgatgggtgagggcagcgtacccggaaaacagctggcccaggcgcatcggctgggcatcctgcaggcaggtgcggcccaggtgcagaatatcggcaaactgcacggctttctggtcgaagcgcgtagccagttgttccacttcatcgatcaatggcccgagcatcgcatgtgtcgcgatcttcaatgccgcagggtacacatcattggtcgactgcgaggcattcacatggtcattggggtgcaccacgtcatacgaacccgccgcgtggcccatcaattgctgggcgcggttggcgatgacctcattgaagttcatgttggtggacgtgccgccggacccttccagcaggtcaacgatcagcgagtcgtcgcaccggccggcgatcacttcggcgcaggcttgcacgatggcgtcgcactggggctgggcaagtacgccgcaggcgcggttggccagtgcggccgcccacttgcactgggcaaaggcatcgcggaaggccgggtaataagcgatggtcagcggtgatacgctgaggttgtcgaacccgcgcaccgagttcaccccgtacagcttgtctgccggaatctgtacgtcgccgacgtaatcggtttccagccgtgtagcaacagcatcaaaaatactcacgagcatcaccctcatcaaattggattaacgcctccacccctttgtccagggccgtgagcctgggcaggaaggagtggcggatcacatcacgcgccgtttcgcacgcatcggcgaaaaaggcgctgtattcattgcgtcgtgctaccaggtaaagcgagcgttccagttgcaggtccggtgtgaggtgcgcggtcacgttgtcgacccaggcactggcctgcaaaaaacacatggggctggtaacggcccaaccgatgccttcggcgaccatcgacgtcagtgcatcggcgttatccagctccaggcggttgggcactcgtacgttcaggctgcgcagatgacgctcgatctgcagccccacctgggacatccggttgaagcgcaccaccggcagcacattggccagcgcgcgtacgtcctcgaccgtgtggatatcgcagcgcgcttgcctgggcgtgataacaaagtacttttctgaaaacagccgatagcgaatcacgtcattggcgtccatcaacgggtcgctggtgacgatcaggtccaggtcgcgccgcaacagggattcaccttgttgcgggctgagccctgtgcgaatggacaactgcgcgaccttgccgagcaattgccgggtgaacaccgacccgcaggtggcggcgaaggagtccaccaggccgatgcgcaggtcggggttcacaccgcgcccggcgtcgatcacttgtgccttgaggtgggacagttcctcgctcaacaccgagccccgattgcgcagggcaaccccgaatgcggtgagggccatgggccgggtggtgcggtccaccagcaccacccccagttcctcctccaattgacgcaccatctgtgacacgccggactgggaaatacccatgcgcgcggcggccccggacatgctgccttcctcggcaaccgcgatgaacacctggactgcatacatgtcgatcagcctgttcgcagacatcctcaacctcacttgatggtgttattcaatggcaaccttggcgtccgtccgaagaggatcgggcgtgacccccgacaagtcttccttgctggtttctggcgcaaacacgtggcagaacacgccgccgaagaccagcacgccaacgcatacgcccaacgccgcatggacccccacgtgctgcaccgcgactggcagcaggaacgtcgccaccgccgagccgaaccggctggccgccacggccaggccgatccccgaggcccgcagatgggtggggaacaattcgggtgggtagacgaactccaggttgaccgccgccgccatcacacaggcaaaaacgccgaaggcgaggatggtgcccagggggccgaaaccggcgtaggccaatactgccaggcccgcagcactcaagtagaaggtgccgaccaggaatacgcgccgggacagccgatcaatgaccagcagaccgagcagtgcgccgagcaatagcaacacgttgtagaccaggccaccggcaaacttgtcctgcacgttcagggcttccaggactttgggtgcgaatgtgccgagggcgaagaacggaatcacctggcaggtgtagaacacgcaacccaccagcgtatttttgcgccagcgcgggctgaacagttctgcccagctgccacgctgcttgtgcccattggccggggccacgggtgctggcaggaacacatgcgggccgaacttgctgcgcacaatggccatggcttcctggctacgcccgcgagccatcaaccagatcggcgattccggcacgcccatgcgcaagggcagaatcaacagggctgggacgccgctgagggccagcatcacgcgccaggcatccgggccgatatcgcggatggcaaagcccaccagatacgccgccacatagcccgccgcccaagctgccgctagcacactgagcaggcgtccccgatagcggcgcggggcaaattcggtcaccagtgacttgctcacgacatagtcgaagcccagcaccagccccagcagcaaacgcagcgccagcaactgctcgggcgaggtgacaaagaactgcgacgcagagatgacggcgaacaacagcatgtcccaggcgaagattgcccgccggccgaacttgtccgcgataggcccggccaacaggctgccaaggaacagtcccgccaaggacgcggcgcccagcaagcccatccataatgccgtcaactgtaacgggccggccgccatgctgacggcgatcccgataatgcccagtacgaaaccatcactgaactggccacccgtgccgctgaataccgtgcggatatggaagcggctcagcggaaggtcttcgaacgctacttgaccactcattcgtctctccacttgcgtttttatagttgtgggaaccggtgcatcggcaccggctgagagcgagtctagggcgacagcttcacgaaatcagcaggtgccctgtgagtatcaagatagctgatactgagggccgcttttcttgaacaggggacaaagatatgagcgagtacgcgcaactgactcacgagcttgaacaggcacaaagtaggacccacatcacagctgcgacagatggcggccaataagcatttacgtccacccccaatcgatgagaaaagcacgtccattccctcggatatggacatcgcatgcctcgttcaaccctcatcgttcgtgtattcgtcgcgctgctggccagtcttgcgctcgggtatatctggatcatcgtcagcgccaagctggaaatcggcggcgccagcccgaatcaacaacggctgggcacactgccgggcgtgcggccacacgcggtcagccaggattgcaccggagtgaaggtgaccgcccagggcacgtggctggtggggcgggtgacgaatgaatatgaacagctggaaccctcaagcgagcgggtggacttgaatggcttgctcgacggcgaactgcgttcggagccggagaccaccgtggttgcgcgtctgggggctgacggggtgttcaagcaggtcgcccaggtcagcggctcggcctgcctggtggcgagtgcggagggcgcgcgcgtgtttctgctgagttcgctctatcgacccaacgatgtggggggccagaacgcggtgttccgcagtgatgaccagggcaagacctggcgctgggtggccgacgggtttttccccgaggtgagcggtgtggccaccctggtttcgccgtacttctataatcaggacgaggtctgggcctcgcgttgggccgatgacgtcgagccgcaggccggggtgtattactccgccgacggtggcgcccacagcacgccgatcacggtgccacaaccgctggcggtgacccaagactacgcccacagcctgcgcccggatatccaggagtggcgcgattcaaccgaacagctgacccacgtattgcaacaggatgcgcagcacgcggtgatctgggtgtcgcaacgcttctggggcagccatcccgatggcaagagcgacaacctggcgatcggtgtcaccactcgcgtgcagttgaagcgcacggccggcacgtggcaagtcgaggatattcagcgggaaaacggcctgtacatcagcgagcttgcggacaacggcgccgggcgcgtgatcggcctgatcgaccaggggccccatgggcgcgcggtggtcgccgaattgaacaccgcgacgctggcctggaaaacggtgggcgacttgcccagtgtgttctcgcccttgagtgccgatacccaggcgcgtgggctatgggtagggcgcaacagcctggtggtcaatacctacagcgatcataagccgccgcgttggctgtactggtggagcgaggcgagtatctccgccgatgcggtgttctattcgacggactggggccattcctggaagcgtctgtcgctggacgggtacatgggcgtgcgcgggtttgacggtgccagtgatcgggtgttctggagcaaacagaattacgccgacgacaccctcattcaagcctatggcctgcgctgaatcgcctacaacggcgtcaacacgttcatcaccgtatccaacgccacccgcgtgtcatccagttgcaccagcgacgcatgccgcgcgccgagggcgtcgcggttctggatcgcggtgaggatcgccttgtgccggggcaggctcaggccctggatgtcggggcggcggttggtgatgttgatcgactcgcgcaacggcagcgacagcatgttgcacatgtaggcgagcaagtcgttgcgcgtggcgtcggcgatggcgcggtggaagtccaggtcggcctgcagcagctgttcgtgggtctgcgcggtttccatgccctggtaggctttttcgatggtggcgatgtcttcgtcggtggcggtggtcgcggccatggcggcgatctccggttcgaggatgcgccgcacaccggccagggtgttgaagaactcactgtggggtgtggactgcatcaaccaggacaacacgtccgggtctagcaggtgccacttcacgcgaggccgcaccaccgcgcccacccgtggcttggaatacaccaggcccttggcgctgagcacccgcgtggcttcgcgcaacaccgagcggctgacctggtactcctcgcagagcgtggcctccatgggcagccgttcttcgggcttgaagcggccggaaacgatgtgcatgcccaagtcctgaacgatctgggcatgctggctcttgcgcggcttgggcggctggtgatccatgacgacggggaggctctggcttaaagacgcggcatcatagcatcccaattagtgggaatgccgtgggacttccgccccacggcaacccaccaggaagtcaaagtcgcagccctggtcggcctgcagcacatggtcgatgtacagctggcggtagccgccgacgatgaggttctgcggaggcgccaggtctgccatgcgcgccgccagctctgcgtcggggatgtccagatgcaggcggccgttggcgcagtccagttcgatccagtcgccttcccgcaccgtggccaacggaccgccggcagcggcttccggtgccacgtgcaacaccaccgtgccgtacgccgtgccgctcatgcgtgcatcggagatccgcaccatatcggtcacaccctgggccagcagcttggccggcaggcccatgttgccgacctcggccatgcccgggtagcccttgggcccgcagtttttcatgaccaggatcgagttggcgtccacgtccagttccgggtcgttgatgcgcgccttgtacatgtcgaagttctcgaacaccaccgcacggccacggtgctgcatcagctctgggctggcggcggacggcttgagcaccgcgcccagcggggcgaggttgccgcgcagcacgcagatgccgccgtcggcgcggatcgggttgtcgagggtgcggatcacttcgtcctggccgtagatcggtgagtcctgggtgttctcgcccagggtcttgccgttgacggtcagggcattcggatgcgggatcaggttggcttcacccaggcggcgcagcaccgcgggcaggccgccggcgtagtagaactcttccatcaggaagcgccccgagggttgcaggtcgacgatggtcggcatgccacggcccatgcgggtccagtcgtcgaggtcgagttcgacgccgatgcgcccggcgatggccttgagatggatcactgcattggtcgagccgccgatggccgcgttgacgcggatcgcgttttcaaacgcctctttggtgaggatcttcgacagcttcaagtcttcgcgcaccatctccacggcacgcatgccggacatgtgcgccagcacataacgccgcgcatccaccgccgggatcgccgcgttgtggggcagggacgtgcccagcgcctcggccatgcaggccatggtcgatgcggtgcccatggtgttgcaggtgcccgccgagcgcgacatgccgccctcggccgcgaggaagtcatccagggtgatggtgccagctttcacctgttcgctgagctgccacaccacggtgcccgagccgatgtcctggcccttgtgcttgccgttgagcatcggcccgccggtgaccacgatggccggcacgtcgcaactggcggcgcccatcagcagggccggggtggttttgtcgcagccggtcagcagtaccacgccgtcaatcgggttgccgcgaatcgcctcttccacgtccatgctcgccaggttgcgggtgagcatggcggtggggcgcaggttggattcgccattggagaacaccgggaactccaccgggaagccgccggcctcgattacgccgcgtttgacgtgctcggcgatctggcggaaatgcgcgttgcacggggtcagctccgaccaggtattgcagatgccgatgatcggcttgccatggaactgatggtcggcaatgccttggttcttcatccagctgcggtacatgaagccgttcttgtcggcggtaccgaaccactgggcggagcggaggccgggctttttatcaggcatgatcgattctcttattgtatgactatatgttctatgcgtgcttaaacataagcgcaaaaacgctgctttggaagagttgttttgcaaatagtcatactatatagtcgggttcaactgaggtatggccctggcggattttcgcgagaggcgtcccccgagcttctataaaaacaacaatcggagatcgaccccatgagccaggaactgcggcttattcggcgcatcacgctgaaactgattcccttcctgatcctgctgtacctgatcgcctacgtggaccgctccgccgtgggcttcgccaagttgcacatgggcgccgacgtcggcatcggcgacgctgcctatggcctgggcgcggggttgttcttcattggctacttcctgttcgagatccccagcaacctgatgctcgaccgcttcggcgcacgccgctggtttgcgcggatcatgatcacctggggcgccatcaccatcggcatggccttcgtgcaggggccgcacagcttctatgtgatgcgctttctgctcggcgcggcggaagcggggttcttccccggcgtgctgtactacatcacccaatggtttccggtacgccatcgcggcaagatcctcgggctgttcatcctgtcgcaacccatcgcgatgatgatcaccgggccagtgtccggtggcctgctgggcatggacggcatcctggggctgcacggctggcaatggctgttcatcgtcatcggcactccggcgatcctgctgacctggccggtgctgcgcttcctgccggatggccccaagcacgtcagctggatgagcgacgacgaaaaggcctggctcaccggcgaactcgccaaagacctgcaaacctacggccagacccgtcacggcaacccgctgcatgccttgaaagacccacgcgtgttgctgctggcgctgttctacctgccggtgaccctgagcatctacggcctgggcctgtggctgccgaccctgatcaagcaattcggcggcactgacctggtcaccggctttatcgctgcggtgccgtatatcttcggcatcatcggcctgctgatcatcccgcgcagttccgatcgtttgaacgaccgctacggccacctcgcggtgctctacgtgctgggcgccatcggcctgttcttcagtgccgcgctcagtgtgccggtgctgcaaatggccgcgctgtgcctggcggcgttcgcgatgttttcctgcaccgccgtgttctggaccttgcccgggcgcttcttcgccggcgccagtgcggcggcgggcattgcgttgatcaattcggtgggcaacctcggcggctatatcggcccgttcgtgatcggcgcgctcaaggaatacaccggcaacctcgcatcgggtttgtacttcttgtccggggtgatgctgttcgggctggtgctgaccttggtggtctaccgcctgctcgagcgcaagcacgtgctgcccgccgaccaatttgccgccagtgcccgtggcgccacccgaccttaatccaggagaacagtcatgcgtttagttcagttcgagttgcgtaacggtgaccgccgcgtcggcgtggtcgacggcacccagctgcgcgaagtacacacagcccgcagcgtgcgcgagttggccctcgccgccatcgacgccggcgtaggcctggcgcaatacgtggacagcctgggcctggatgacagctacgactacgcaacgctgctggccgacctgaggattctgccgccgctggaccacccggacccggcccacatgctgatcagcggcactggcctgacccacctgggcagcgcctcggcacgggacaagatgcaccaggccggcgacgacacggcgctgaccgacaccatgcgcatcttccgatggggcgtggagggtggccgtccaccggctggccaggcgggcgtgcaacccgagtggttctacaagggcgacggcagcatcgtggtgcgccccggcgcagccttcccggtgccaccgtttgccgaggatgccggtgaagagccggagatcggcggcctgtatgtgatcggcccggacagcaagccctatcgcgtcggttttgcggtgggcaatgaattctccgaccacatcatggagcgcaagaactacctgtacctggcccattccaagctgcgcagttgcagctatggcccggagttgcgcgtgggcgagttgccccagcatctggcgggcaccagccgtattctgcgcaacggcgaagtgatctggcagaacgagttcctcagcggcgaggccaatatgtgccacagcctggagaaccttgagtaccaccacttcaaataccaacagttcctcaagcccggcgatgtgcacatccacttcttcggcaccgccacgctgtcattcgccgacggtatacggacccaggccggcgatgtgttcgagatcagccaggccgagttcggtgcgccgctggtcaaccgtgtcggcagcagcgctgcggcgttcgaacccggcaacgtcatcaccctttaatggagaaccccatgactcagtttctcggccacaactacatcggcggccagcgcagcgccaacggcagcgtcacgctgaaaagcgtcgacgccagcaccggcgaggccttgccccaggactttttccaggccacgccgcaggaagtcgacgccgccgccaaggctgccgcgcaggcctaccctgcgtaccgcgccttgagtgcctcgcgccgtgcacagttcctggatgcggtggccgatgagctggacgcgctggcggatgattttgtcgagctggtctgccgcgaaaccgcgctgccggccgcccgcatcaagggcgaacgcggacgtaccagcggccagatgcgcctgtttgccacagtgctgcgtcgcggtgatttctacggtgcgcgcatcgacaaggcactgcccgaccgccaaccgctgccacgcccggacctgcgtcaataccgcatcggccttgggccggtggcagtgtttggcgcgagcaacttccccctggcgttttccacggcgggcggtgatacggcggcggctttggcggccggctgcccggtggtgttcaaggcccacagcgggcatatggcgactgccgaacgcgttgccgatgcgatcatccgcgcggccgaggctaccgagatgccggccggtgtgttcaatatgatcttcggcggtggcgtgggtgaagcgctggtcaagcacccggcaatccaggcggtgggctttaccggctcactcaagggcgggcgtgccttgtgcgacatggcggcggcgcgcccgcagccgatcccggtgttcgccgagatgtcgagcatcaacccagtgatcgtattgccccaggccctgaccacgcgggccgacagcgtggcgcgcaacctgaccgcctcggtggtacaaggctgcggccaattttgcaccaaccctggcctggtgatcggtatcgcgtcgcccgcattcaccgcgttcacccagcaagtcgcgcaactgatcggcgcgcaaccggcgcagaccatgctcaacgccggcaccctgggcagctacggcaaaggcctggaaaaactcctggcgcacccgggcatccagcacctggcgggcaaccagcaggccggccatcaggcgcaaccacagctgttcaaggccgatgtgaacctgttgatcgacggtgatgaagtgctgcaggaagaagtgttcggccccaccaccgtgttcgtcgaagtcgccgaccaggcccagctcagcgccgccttgcacggcctgcacgggcaactcacggcgacgatcattggcgagccggccgacctgcaacagttcgccgaactcacgccgctgctggagcagaaggtcgggcgcatcctgctcaacggctaccccaccggtgtggaagtctgcgattcgatggtgcatggcggcccgtacccggccacctcggatgcccgtggcacctcggtcggcaccttggccatcgagcgtttcctgcgcccggtgtgcttccagaattaccctgatagcctgctgcccgacgcgttgaaaaacgccaacccgttgcgtatccagcggctggtggatggcacgccatcccgcgacccgctgtaacgcgcacctgagaacaacaacaatccaggaggcatcatgtcgtgtatcgccgttaccccgcaccgtgcgcaattgggcgagggaccgttctgggacgcgcccacccaggcgctgtactgggtgaatatcgccggcaaacaggcgctgcgcctgatgggcgggcagttgcgggtatggcagttgcccgagcatgtctcggcgttcattccgtgtgaacgcggcgatgccctggtgaccctgagcagcggcgtgtatcgcctcgacctggccaccgaggccctgaccctgctgtgcgtggctgacccgcaaccgggcaaccgtggcaacgaagcacgctgcgatgcccagggccgcctgtggctgggcaccatgcagaacaacatcggcgagcagggtgaagacctgcccatcacccggcgctccggtggcctgttccgtatcgatgccgatgcgcaggtcacgccgttgctcagcggcctgggcattcccaataccttgctgtggagtgatgacggtcggcaggtgcatttcggcgacagcctggacggcacgctgtaccgccacgctatccagccagacggccaactcgaatccgcgcaggtgtggttcggtccccacgagcgtggcgggccggacggttcggccatggatgtgcagggctatatctggaatgcccgctgggacggcagttgcctgctgcgcctcacgcccgacggcaccgtcgagcgcatcatcgaactgcccgtcagccgccccaccagttgtgtgtttggtggcccggacctgaccactctgtacatcaccagcgcggccagcccgttggatcaccccttggatggcgcggtgttggccatcgaggtcgatgtgcctggaaaaccctgtcatcgctttgccggataagtccccgtttaaaaacaacaacaaggagtcacccgtatgaatcgtcgtcgtggtttgcgttccctgtgctgcgccgctgtggcggtctcggccatgagcttgagcgggctgttgctggccgctgaagaagtgaagatcggtttcctggtcaagcaggccgaggagccgtggttccagactgaatgggccttcgccgagaaagccggcaaggaacatggcttcaccgtgatcaagatcgccgtgcccgatggcgagaagaccctttcggccatcgacagcctggccgccaacggtgccaagggctttgtgatctgcccgccggatgtgtccctcggcccggccatcgtcgccaaggccaaggccaacggtttgaaagtcattgccgtggatgaccgctttgtcgacgccaagggcaacttcatggaggacgtgccgtacctgggcatggcggcctttgaagtgggccaaaagcagggcgccgcgatggcggccgaagcgaaaaaacgcggctgggactggaaggacacctacgcggtgatcaacaccttcaacgaactcgacaccggcaagaaacgcaccgacggctcggtcaaatccctggaagaggccggcatgcccaaggaccacatcctgttcaccgccgccaagaccctcgacgtacccggcagcatggacgccaccaactcggccctggtcaagctgcccagcggcgcgaaaaacctgatcatcggcggcatgaacgacaacaccgtgctgggcggcgtacgcgccaccgaaagcgccggcttcaaggctgccaatgtgatcggtatcggcatcaatggcaccgacgccattggcgaactgaaaaagcctgaaagcggcttctttggctcgatgctgcccagcccgcatatcgagggctacaacactgcgaagatgatgttcgattgggtcactaaaggcaccgagcctgcgaaatacacggcgatggacgaagtgacgctgatcacccgcgccaatttcaaggacgaactgaccaagatcgggttgtggcaatgaccgctgccgtcctgcagtttgacggcatcggcaagacctttcctggggtcaaggcgctggatggcatcagcttcagcgcccaccctgggcaggtgcacgccctgatgggcgagaacggtgcgggcaagtcgacgctgctgaagatcctcggcggcgcctacattcccagcagcggcacgctgcggatcggcgcgcaggccatggccttccgaaatgccgccgacagcattgccagcggcgtggcggtgatccaccaggagttgcacctagtgccggaaatgacagtggccgagaacctgttcctcggccacttgccctcgtgttttggcgtggtcaaccgggggctcctgcgcaagcaggccctcgcgtgcctcaaggggctggcggatgaaatcgaccctgccgagaaactcggacgtctgtccctgggccagcgccaattggtggaaatcgccaaggcgctgtcccgtggcgcccaggtgatcgccttcgacgagcccaccagcagcctgtcggcgcgggaaatcgaccgcctgatggcgatcatcacgcgcctgcgcgatgagggcaaagtggtgctctatgtgtcgcaccgcatggaagaagtgttccgcatctgcaacgccgtcacggtgttcaaggacggtcggtatgtgcgtacgttcgaggacatgagcgctttgacccacgaccaactggtgacctgcatggtcggtcgcgacatccaggacatctacgactaccgcccgcgtgagcacggcgaagtcgcgctcaaggtcgatggcctgctcggtcccggcctgcgtgagccgatcagtttcagcgtgcgcaagggcgagatccttggcctgttcgggctggtcggggctgggcgcaccgagctgttccggctgctcagcggcctggagcgcgccagtgccggcagcctgcatttgtgcgggcaggcgctgcaactgcgctcgcccagggatgccatcgccgccggcgtgctgctgtgcccggaagaccgcaagaaagagggcatcattccgctgtccagcgtcgccgagaacatcaatatcagcgcacgcggtgcccactccaggttcggctggctgctgcgcgagggctgggaaaagggcaacgccgaccagcagatccaggccatgaaggtcaagacacccaacgccgcgcagaagatcatgtacctgtccggtggcaatcagcagaaggccattctcggtcgctggctgtcgatgccgatgaaagtgctgctgctggacgaaccgacccgtggcatcgatatcggcgccaaggccgagatctaccagatcatccataacctggcggcccagggcattgcggtgattgtggtgtccagcgacctgatggaagtgatgggcatctccgaccgcatcctggtgctgtgcgaaggcgcgatgcgcggcgaacaaacccgcgagcacgctaccgaatccaacctgctgcaactggccctgccgcgcagcgtggcgaactgagagacgactatgaccactcaacacaacgtgctgcccacggcacgcaagcccctggacctgcgggccttgctggataactgggcgatgctgctggcggcagtgagcatctttttgctgtgcgccttgctgatcgataacttcctgtcaccgctgaacatgcgtggcttgggcctggcgatttccaccgtgggcatcgcggcctgcaccatgctgttctgcctggcgtcggggcatttcgacctgtcggtgggctcggtgatcgcctgcgccggggtggtggcggcgattgtgatgcgcgacaccgacagtgtcctgctcggcattggcgccgccttgctgatgggcctgatggtggggctgatcaacggtatcgtgatcgccaagctgcgggtcaacgcgctgatcaccaccctggcgaccatgcagatcgtgcgcggcctggcgtacatcttcgccaacggcaaggcggtgggtgtgtcccaggatcagttcttcatcttcggcaacggccagttgctgggggtgccggtgccgatcctgatcacgatcctgtgcttcctgttctttggctggctgctcaactacaccacctacgggcgcaacaccatggccatcggcggcaacccggaagcggcgttgctggcgggcgtgaatgtggaccgcaccaagatcctgatctttgccatgcacggggtgatcggtgcgttggccggggtgatcctggcgtcacgcatgacctccggccagccgatgatcggccagggctttgagctgacggtgatctcggcctgtgtgctgggcggggtgtcgttgagtggtggggtggggatgatccgccatgtgattgccggggtgttgattttggcgatcatcgagaatgcgatgaacctgaagaacatcgataccttctaccagtacgtgatccgcggctcgatcctgctgctggcggtggtcatcgatcgcatgaaacaacgctgatcccaagccaaatgtagttccaaatgtgggagggggcttgcccccgatagcggtgtgtcagtgtgcatctctgtctttgacactctgctatcgggggcaagccccctcccacaagtttagtccgcggagaatttgaagacggtgttctgggtgtaggtctgccctgggttcaggcgggtcgacgcaaacttgggctggttaggcgcatccggaaaatgctgggtctccagcgtaaacccgctccagtgctgataggtcttgccagccttgcccttcaccgatccatcgaggaagttgctggtataaaactgcaccccaggctcggtggtaaacagctgcaagcgccgcccggacgcaggatcatgcacctcggccgccacctgcttcacgtcaccctgggtatccaatgcccagttgaagtcgaacccaccctgtttcggctcggcgaatttgagctgcgggtgatcgtccttgatgtgctggccgatcggcgtcggcgtgaggaagtccatcggtgtgcccttgaccggcgccagttcgccggtgggaatcagcgtcgcattcaccggcgtgtaatggctggcatgcaaggtggcgacctgcttgaggatgtcgccattgcccgcaccggccaggttgaagtagctgtggttggtgaggttgagcaccgtgggtttgtcggtggtggcgctgtagtcgatgtgcagttcgttgttgtcattgaggcggtaggtgacttcggtcttcaggttgccggggaagcccatttcaccgtccttggacaggtaggtgagggtcacgccaaccgagtccttggccttgacttgggtggctttccacacccgcttgtcgaagccctgggcgccgccgtgcagcgagttggggccgtcgttgagtggcacctggtagcgcttgccgtcgagttcgaaggcgccgccggccaggcggttgccgaaacgaccgatggttgcgccgaagaacgccgtaccgctctgatagccttgcacgtcgtcaaagcccagtaccacgtcgtcgagcttgccatttttgtccggcaccttcagcgactgcaacacgccgccgtaggtgatcaccgtggcttgcatgccatggctgttacgcaggatgtactgctcgacggcagtgccgtcattggttttaccgaacgctttgtgttcgctggtaaggcctgccgcctgggcgccgccgctggcgaccagcatggacagggcaaggcccgaaagcaggtaacgagggtgcttcatggtcgaacttccttttgttgttttgagtggaatagttctactaatgtgcgatattttgtcgatatgacagcgaatttatagccttaaaccgggtttttgcaaaataaaataagactaattaagcgaggcaaccttttatgacgacgcaacatgcggtttaccccgaccttgaaggcaagaccgtcctgatctccgggggtgcctcgggcatcggcgaattcatggtgcgcgccttcgcggcccaaggcgccaaggtcggctttgtcgaccgcgcacaaagccagggcgaacgcctggcagcgctgttgagttcacgcgggcacagcgtggaattcgtcaattgcgacatcaccgacgagattgcctataaagccgccatcactcgtttcgaacactccctggggccgatcaccgtactggtgaacaacgccgccaacgacgtgcggcataccctggaggaggtcgactcggagatgttcgaccggctgatctccgtcaacctcaagcacgccttctttgccgccaaggcggtggtgccgatgatgaagggcgcgggcggcggggcgatcatcaacctggggtcggtcggctggatgatggcttcggccggctacccggtatacgccgccagcaaggccgccgcccacggcatgacccgcgccctggcccgagaattggggccgagccgcatccgcgtgaacacgctggtgccgggttgggtgatgacggaaaaacaactggcgatgtgggtcgacgatgccgccaaggaactgatcagccgcagccaatgtttgccggggagtgtgttgccggaacacatcgccaacatggcgttgtttcttgcctcggatgcctcggcgatgtgttcggcgcagaactttattgtggatggtgggtgggtctgagtcgggctcaatccttcagtcaacactgaactgatgtgggagggggcttgcccccgatggcagtgtttcagtaacaggtgtgcagactgaggccacgctatcggcggcaattcgaatcgtcacgccgccccccacattagaactggcttgcctactcgattggataacgcttgaaagccgagtgctgttccaggcgctcggcgtggcgtttcaggttggggaacgcatcggcctcgaccaccgacgccacggtgaactggctgaacgaccaggcgactgccgctgtcagggaagcctgggtcaactcctgactgtcaggcagttgtttttccagcagcgagtaggccgccagcaactggccgctgacgcgatccagccagggcgcatgcagcttttcggccgggcgcaggttgtgttcgtaaacgatctgcacgcttttctcgcaggccgccagggccaggccaaggatatgcaggtcatgggcacgggcgtcgggggaagggggcagcagctttttgtcggccggggccagggtttccagatagtcgaggatcaggctggaatccatcagcaccgtgccgtcatccagcaccagggtcggggccttgaccaccgggttgatctgggcgaactcgctgaaggtgctgaacaccgacagtggttcatgcacaaaatccacgccgtacaggtccagggaaatggccacgcggcgtacgtagggcgagtccagcatgccgatcagtttcatgaagcctccgttgctcacaaggtgatggctccagagagtaagggcacaggatcggcatgcgcaatgactgaatgttgcctgcaaaggtcaggctgcggtcattcaggcaggacgcctgatgttctgccggctggcccccggtggctggccggtaatgcgcttgaatgcacgactgaacgccgcctgggaggtgtagcccaggcgcagcgccacttcttcgatgggtaaacgctccagggtcagccattggctggccaggcgcatgcgcagttccgtcatgtagcgcagtggcgggatacccaaggtcgcctggaagcgttcggcgaataccgagcgggaggtatgacactgcgcggccagttcggccacgctccaatcgcgcccgggttgctggtgcagcacgagcagggcgcccgccaaccgtgggtcgcgcaacgccgccaccagccccgaggcattgccgcaggcacactccacccaaccccgcacaatcatggcggccaccacatcggccaggcgcgtgaggatgccggggtagccgacgcgagccgtggcgacttcgcgttccatcaccgccaggatcggcatcaggccggggtaacgctggccctgggcatcgatcagcatcaaggccggcatcaggctgcccagcccctggagactgccgagttcgaactccatgcaggcactgaacagcaaggtacgtggcggcgagtccggtgatgcatccacagcgcagacgctatcgcccagcgacgtcgcgtcaaagcctccgatgtcctgcaccggcctgtccgcactggacagcagcgcatgggcaccgccgtgggagatgaacacggcattgcccgcggacaattcgaacaggctgtcgtcgtcggtgcgcagggtggctgtccctgcggcaaggaaatggaagtaggcatgccccggtctggcgtcaaagcccatgccgaagctcggcccggcctggatacgtcgatactgcacgccgcgcaggcgcatgccgcgcagcagttcgtcgataaggtcggaggacagggtgaacggtgccgctgcagtcatgttcggggtttcggtcaaaaactaaagtgtttgaatcatagatcatccgggttggcaaacctagactggccgtcgtgctaatgaccgaggatgtcgtgtgatgaatgattgtgtagcccaagccgctcaccctgcccaggtggcgcccgatgcgcccgcctggatggcggtgttttccctggccatgggggtgttcggcttgttgacggccgaatacctgccggccagcctgctgacgccaatggcgatggaccttggcgtgtcggaggcgctggccgggcaggccgtgactgtgacggcggtggtggcgttgttcgccgggttgctggtgccgggcctgacgcgtggaatcgaccggcgcgtggtgctgctgggtttttccctgctgatgattgcttccaacctgttggtggcgttttcttccagcctggcggtgctgctgttgatgcgcatcctgctgggggttgccctgggcggcttctggagcatggcggcggctgtcgcgatgcgcctggtgccggcggcgctgctgccccgggcgctgtcgatcatcttcagtgggattgccgtgggcacggtggttgccgtgccgctgggcagctacctcggcggcgtgtacggctggcgcagtgcatttgtggcagcggcagcggtcggcacggtgacgctggtgttccagctgttcacgctgccgcgcctggctcccacgggcagtgcacgcttgcgcacggtgctggatgtgctgctgcgtccaggcatcgccatcggcatgttgggctgcgtgctggtgcacaccgggcactttgcgttgttcacctacatccggcccttcctggaaagcaccacgggcgtgggcaccgaagggctggccttgatgctgctgggcttcggcgccgccaatttcgtcggcacgctgttggccggttggatgctggtgcgttatccgcgcggcacgctggtgctgatgccggtgttggtaggcgtcgcggcgctggccctggtgttgctgccggcctcgctgccaggccaggcgttgctgctggcgctgtggggcatggcctttggcggggtgcccgtggcgtggtcgaactgggtggcccgcgctgtaccggatcaagctgaaagtgccggcggcatggtggtggcgtccgtgcaatcggccattgcggcgggcgcggccggagggggcgcgatgttcagtctcagtggcatcagcggcgtgtttctcggcgccggtgtgttgatgctgttggctgccctgttgattgcactgcgggtaacagtgccgggcaatgacgccgtgggtgcaccgctgcatctttgacgtcagcctggagattggccgtattcacggtgtgacgagccatcgacctttggtttagtctggagcgcttcgttgaacgcaagcacatttggagcagtaagcatgaccgattacgtacccccgaaagtgtggacctgggacaccgagaatggcggcactttcgccagcatcaaccgccctgtggccggcgcgacccatgaaaaggaattgccggtgggcaagcatccactgcagttgtactccctggccacgcccaacgggcagaaggtcacgatcctgctggaagagctgttggccctggggcacagcggcgcggagtacgatgcctggctgatcaagatcggtgacggcgaccagttcggcagcggcttcgtgggggtgaaccccaactccaagatcccggcactgctggaccgcagcgacgccacgccgattcgggtgttcgagtccggagcgatcctgcagtacctggccgagaagtttggcgcgttcttccccaccgagccggcggcccgcgccgaatgcctgtcgtggttgttctggcagatgggcagcgcgccctacctaggcggtggtttcggccacttctatgcgtatgcgccgagcaagatggaatatgcgatcgaccgctttgccatggagaccaagcgtcagctcgatgtgctcgaccagcgcctggcggtgagccaatacatcgcgggtgatgaatacaccatcgccgatatcgcgatctggccctggtatggcgggttggtcaaaggccgtttgtacggcgcggcggagttcctctcggtgcatgaatacaagcacgtgctgcgctgggccgatgcgattgaagcacggccggcggtgcagcgtggacggcgggtgaatcgggtgtctggcgaggagcagttacccgaacgccatgacgcaagcgacctggactgagtgtgggagggggcttgctcccgatagcggtggatcaggcacggatgtatcgactgacccaccctcatcgggagcaagccccctcccacatttatttgtagcgctgctcgaacaccgccacctgctccggcttgatcagttcaaacggcacccacacctccggctcaatcgcctcgcccttgatcattcgcaccgccgcctgcaaggcctgtgtggcctgggccttcgggtcctggaacaccgaggccgtcagcaagccgcgcttgatcgccgccagcccgtcgggcaagccatcaatgcccacaatcgccacatcgcccttggctttgcccgcttgctgtaaagccatggccgcaccaatcgccatttcatcgttgttggccacgatggcatcgaactgcgtgcccgccagcagccagttgctggtcaggtccatgcccttgctgcgctgccattcggcgctttgctgctcgaccaccttgatcccgggaaagtccttgagcacctgtttggcgccctcggtgcggtcatgggtggcgttctgtgcgaggtcgcccatgatgatcgccacgttgcccttgccgccgagtttttccgccaggtagcgcatctgcaactgcccggcctcgatgtcgttggaggccacggtgaccacgcctttgggcagggtgcgttcgtccgggtggcggttgacgtacaccagtggcgtcttggcggtgacggcggcgcgggtcatgttggcggtggcggcggtgtccaccggcagcacgatcaccgcgtcgaccttctggttgagaaagccttcgacctgattgagctggcgcaccacgtcgccctgggcgtcttcgaactggatctgcacatcctgctgcttggcggcggcttcgaggccggtgcgcacgtaggtcatgaagttatcgtcgacccgggcgatgctcacgccaatgcgataggcggcgaaggtccattggctgaacagcagcaacagcgtggcagcaagcaatgaatagcggttcataagggggttccttttattgttatagggtgaacgcctggcggaaacgtgccagggccaactcactgtcaccgctggcccagccttccaggccgaccacgccgctgtagcccatggcatgcaaggcccgggcgatggccgggtagtggatttcgccggtgccgggctcctggcgccccggcacgtcggccacctggatttcaccgatgtgcgggccggcgcgctggatcagctcgatcaggtttccttcgccgatctgcgcgtggtacaggtccaggttcatcttcaaatgcgggctgcccacggcctcgatcaacgccagagtgtcgtcggcgcgggcgaatggcgtgccggggtgatcgacctcggtgttgaggttttccagcaggaacacacggccggcgtcttcccccaggcgggcgattttttccagggtcttgcaggcgctcagccacatgcggccggtggtctggctcacgggttggacgggcaggccgccgtcacccaggccggtaccgtgcaggttgaggctagggcaattcaactgctcggcgacccctaaggattcgcgggcgctgtcgagcaactggcggatgccgtcggggtcggtgagggtgccgctgatgtagccggtcatggacgtaaagtcggcaccggtggcggcgagggcggcgatgtccttgtgggtccagtcccagatttcaacgctgaagcccagcgcatgaatacgctgtacgcgctcgatgaagggctggtcgagaaacaccatctccgcgctgatcgcgagcttgaacgggctcatagggtcaccgccttgcccgtttcgaacgattcgatacaggcgcgggcaatcgccagcgccgcgcgtgcgtcttcaccgctggccaggggcttggcgccgctgcgcaggcaatcgacaaagtggttgagctcggcgatgtaggcgtcgcgcaacaggtcggtgtccatgcgctgggtgtcggcctggatgccttgggcgaggtagcgcaccaagtcggactcgttaaggctgcccatgctcagcatgccggcgctgccgaacacttcgccgcgcacgtcgtagccatacacggcctggaaattggcttcggcagtggcgatggcgccgttgtcgaagcggatcgcaaccacagcggtgtcgaggaagcctttgtttttgtaatcgggcgcgatcagtgcgtcagccatcacgtagacctgcaccgcctcggcgccggggttgaggtagcgcagcgtgtcgaaatcgtggatcagggtctcgaggaagatcacccattgcggcgaagcggccgggttgttcagcgccgggtcgcgggtcagcgagcgcagcagctgcggggtgccgatgcggccggcggcgacgtcgaggtgcgcggtgcgaaagctcttggcgaaacgccggttgaaaccgacctgcagcggcacccgcgcatcggccgcggccgcgatggcacggtcggcctcatccagggtgatggccatgggtttttcgcagaagatccctttgcccgcgcgggccgcgctgatcaccagctcggcgtggctgcgggcgggggcggcgatgagtacgccgtcgatgtccgggtcgtcgagcaattgttgagggtcggtgtaaaccttgctcacgcccagttcagcggcgaggcgggcggcctggcctggcgtcgggtcggcaatcgccgccaggctggcgccggggatatgccgagcggcggtcaggccgtggaagctgcccatgcgaccggcaccgatcaaacccaggcagatgtgctgtgtactcatgaaataaccccttgttgttattggccccaggacggtcctggtgggcgaaggggtaggagcaaggcttgtgccaattcataacacattgataaatagcgatttattattattcataagcaaatagtgttcatttaatgaacatgtctatactgacatgtcaaaaacatggacatggataccgccccaatgagcatggcgttcagcgtgcaagacctcgactacctcgcagcccttgggcctgctgcgctgaatgatggcccagtggccgcgctggagcaggcctggcgtgactgcctggccggtcaggtcgagcgcccggcgcacgtgcgccaagtgatctgggattcgtggcggcgcagcgtcgaggccggtatcgacccggcagacaaggcgtaccgcttcgtggccgccgaaaccctggccgccacccagaccacccaccgcgtgctgatcgccgccgccgcgcaagtcatgcgaggtttgctggcctacaacccgcgaggccatatcaaccttaccgatgccgacggcaccaccctgtatttctgcgggctggacatcacccccgtgggcagtcgtctgctggaatcggtacaaggcaccaactgcaccggcctggcgctggccgaagatcgcttggtgtacgtgctggccgaggaaaacttcggtatcggcctgcgccagcgccgcatgcactgcgccgctgcgccgatcaagaatgctcaaggccagaccctggccatgctgaccctcaccgccgagcccggctggtttcacttccataccctcggcacggtgcaggcggccgccgaggcagtgtcgcggcagatggcgttgcaggcgttgctggaagagcagcaaaccgtgctcgaagtcctcaacgaaggcctggtggtgctggacgagcgcggctgcatcaaggcgctcaaccgttatgcccggcagttgttcggcgtagggctggagttgatcgggcggccgttccagcaactgggccgtagcgagttgagcgatgccctgggtgaacccgtgcgcgacctcgattgcaccttccacctgaacaatcgcagccaactcgcctgcctggtttcggtgtgcccgctggagcagggcggggtgatcgtgtcgctgcgcgaaaaccgccgcattcgcgaaatcacccggcgtcttatcggcacccaggccagctatacatttgaaaccatccagggcaactcccgcgccatccacgacgccctgcacctgggacgtatcgccagtcgcagcgattccaccaccctgatcctcggcgaaagcggcaccggcaaagagctgttcgcccaggccatccacaacggcagcgaccgccacaaaggccccttcgtagcggtcaactgcggggcgatcccgcgtgacctggtgcaaagcgagctgttcggccatgtcgaaggcgcgttcaccggcgccacccgtggcggctcggcgggcaagttcgaactggcggacggcggcaccatcttcctcgatgagatcggcgacatgtccttcgatgcccaggtcagcctgttgcgggtgttgcaggagggggaaattacccgcgtcggtgcgaaaaactcacggcaagtggacgtgcgcatcatcgccgccacccaccgcaacctgagtcaggcggttgcggagggcgcgtttcgcgaggacctttactaccggctcaatgtattgaacctgaccgtgccgcccctgcgcatgcgccgtgaagacattccgttgctggcgcggcacttcctggcgcgctgtgcacgttcgttgcgtaaatcggtgcagggcttttcgccggaggcgatggcattgctgtcggcctatggctggccgggcaatgtgcgggagttggaaaacagtattgagcgggcgaccaacctggcgatgggcgagctgattcagcctgccgatctgccgatggaaaccaagcagcacaccccgctgcgcgcctatgagccgcaacccgcccaggacctgagtagccacgaaatgcacgccatcgtcgccgcactccaaaataccggcggcaacatccgcctggccgcccggcaactgaatgtgtcgcggggcgggctgtacaacaagatgagccggtttggcttgagtgccagcgatttccgccgcgcctgagattcaagcagcgctgacccctgtggcgagcgggcttgccccgcgttgggnnnnnnnnnnnnnnnnnnnnnnnnnnnnnnnnnnnnnnnnnnnnnnnnnnnnnnnnnnnnnnnnnnnnnnnnnnnnnncccaacgcggggcaagcccgctcgccacagacagccagcgcctgagtgccgttagaggttctccgacgtcacaatctgcggcggtatatacacccgctgccgcaccggatcgaaccgctcggcactctgcaactccaccatcaactgcaccagcgccgtcgccgtctggcccggttgcgagtccatcaccacatcgatcaagccctggcgcagcgcctggcgcgacagctcggtggactcctgcaggatgcaacacagcgctggccgcttgggcaactgcgccagggcgctgatgatgccgtcgccgccgccgcccaccacgcacaggccgcgcaggtcgctgtggcggctgatcaggtcgagggtggcttcttcggtgatgtcgcagttgtccaggttgatcaaaggctccagcggcttgagccccggcgcgtgctcggccaggtagctgtgcaggccttcgacccgtgcctggtggccgagaaaacgatggccgccgagcaggatgcccacgctgcctttgcgcgcgccgcaggtgcgggcgagcaaccagcccatggtgcggccgaccacatgattgtcctggcccacgtagggttcatcggcctgttcgtggatatccgagagcagggcgaccaccggcacgccggctgcgcggatctgcgccaggcacgcgttgatcagcgggtgcgcgaagctgaccaccgccaggccatcgcactgcacggccaattgttcgatctgcgcgacgatggcgctgggcgagcgatccacgatgtactcgaactggcacgtcaggttggcgttggcatgctgttcggcagccgtgctgattgcctgcgccaggctggcatagaacgcctgggcggtggccagcaacaggatgccgaagcgataggtcggccgacgttcgcgaatgcgctggccgatcagccgcgccgcgaaataccccaccgcttcggccgcctggaacacctgctcggcggtctcgggattgaccggtgcccgtgcattcagcacgcggtcgacggtggccacactcagcccggcctgggcggccacgctggcgatggttgggcgtttgtggttgttcatgactggccccttgagcgtcttgatagaaaactatcaagccccgctgggcctggatgatagcttgatagggaatggattcaaggccttgagggtgaataaccggttctctaaggtgggtttcacacagcaccagaaaccacccgcttgcggagaacaataacaatgcctggacacaccgctcctctcacccgtcgcgactacagcctcaccggccccgaagccgcccgcgccgctgaaaaaggcctggtctcggccaactggtaccagtcgcccatctcgcgtaaacgcatgaaagaactgatgcaacgccgtgacggcccggcactgctcgacacggcgatctgggtgatcgcactgtttgccagcggttttggtggctactggttctggggcacctgggcctgcgtgccgttcttcctcgtctatggcgtgctgtatggcaccgcgtccaacccgcgctggcatgaaaccggccacggcaccgccttcaagacccgctggatgaacgacgtgctgtaccaggtcgccagcttcatgtgcatcttcgaaccccacgtgtggcgctggagccatgcccggcaccataccgacaccatcgtggtcggccgcgacccggagatcgtcgagccgcgtccaccgagcttcctgatgatgggcctgagcctgttcaacctgcccctggcctggaagaccttcagcggcgtggcgcgccacgccatcggcaagatgagtgcccaggaagcggacttcatccccgaatccgaatggcccaaggtgttccgtgccgcgcgcatctgggttggaatttatgccgtggtgatcggcaccgccttgtacctgcacagctggctgccgctgatgctggtgggcttgccgagtatttatggcgcctggctcggctatctgttcggcctcacccagcatgttggcctggctgaagacgtactcgaccaccgcagcaattgccgcaccatctacatgaaccgcgtgctgcgctttatctacatggacatgaactaccacctcgaacaccacatgtacccgatggtgccgtaccacgccctcgcgcaattgcacgaagaaatccgcagcgactgcccgccgccctacgccaacctgttcgaggcgtacaaggagatcctgccgaccatctggaagcagcgcagcgaccccacctatttcgtccagcgtccgattcacccgaacacgcatccggccgcccatgcgccggtgcatgcagaaaccgctgccggctgacccccctccaagcacaagagaaaacgccatgaacgatcaatggatcgacgtctgcgccgtgggcgaaatagacgaagaagacgtgctgcgcttcgatcacgggccgcacacttacgcggtgtatcgctcggccgagaatgaatttttcgccaccgccggcctgtgcacccacgagaaaatccacctggccgacggcctggtgatggaccacgtgatcgagtgccccaagcacaacgggcgcttcgattaccgcaccggcaaggccctcggcgcgccggtgtgcgtcaacctcaagacctacccggtgcgggtcgaagcggggcgggtgttgctcgccgtcacggcttgatcatgaacgatcccttgatcatcgtcggcgccggccatgccggtggccgtgcggcgctgaccttgcgtgaagaaggctacaccgggcggctgatcctgattggcgatgagccgcacttgccctacgagcggccgccgctgtccaaaggcgtgttgcagggcacgacggacctggccggctgcagcctgtgcgacagcgtccggctggccgagttgggcattgagcatatcgccgctaacccggtgacgcagttgcagccgcaacagcatcgcctgcaactggccgatggccaatggctgcggtacgccggactgctgctggccaccggggggcgggcgcgccgcttgcctcaggagcaggccaacctgctctacctgcgtacccacgatgaagcgctggccctgcgcgctgcgctgaaggccgggacgcggctggtggtggtcggcggcggattcatcggcctggaagtggcggcgacggcacgtggcctgggctgtgaggtaaccctgcttgaagccgggccgcgattggcgggccgggtgttgccgccggttatctctgaggcgctgctggccttgcatcgccagcacggcgtcgacgttcgcctgaaggtggccttggagtcgatccaggccgacgccgtgctgctggtggacgggcagcgcttaccctgcgacctggtagtggtcggcatcggcatgcaacccaatatcgaattggccacggcggcggggttggacgtggggcagggcattcgcgtggatacgcacctgcgcaccagcgcgccggatatttttgccgccggtgacgtgtgtgagtttcgcctggatggcctgtatcaacgccaggaaacctggcgcaacgccgaggcccaggggaggcatgcggcgctgaacctgctgggccgcgatgtgccgttcgaggcgctccccggattctggtccgaccagtacgactggggcttgcagaccgtcggcgtgatcacgcccttgacggtcagccggccattggcgggcggtggcttgctgctgttttacctggacgccaatcaccgcttgcaaggtgcctgcggatgggcgcccggcaacagcgtggccaaggacatcaaactctgcgagcgcctgatcaacgcgcgactcccactcgatcccgtcagcctggccgaccccgagctgtccctcaaacacctgctgcgaggctgatatgcgccaattcctggtgttccaatccctgtgggccatgcagaccgaacccggcccactcgaggctcaactcgagcgcatcaaggccgccggtttcgacggcattaccgaccatttctacgaacccgccgatgtcgcccgcctgcacgccgctgccacagcgcagggcttgcagatcgaaggccagttgttcccgcaatcggtggatgacctggccgccgcactggatgtgatcagcgcctacggctgccaccacctcaccctgcaagccgatgtgcgcccacgcacccaggccgaggcggcccgactggtggaaggctggcagcgcttggccgagcaggtggattttccggtgctgctggaaacccaccgttatcgcctcaccaacgacctgctgttcacccttgacctgctggcacagatgccggatttgaagctgctggccgacctgtcccactacgtggtcgggcgtgaactgccggagcctggcgccgccgaggacgatgcgcagatacgccgcatcctgcgcaacagctggggtttccatggtcgcgtggccagtagcgagcaggtgcaggtgtcgttggacttcccccagcaccaagcctgggtgcagcggtttaccgagtggtggcgctacgggatcgaagactggctggcccgcccgcagacgccgcagagcctgtcctttacctgcgaactcggcccgccgccctatgcgatcaccggtgcggacggccgcgagatcagcgatcgctgggccgaagcgctgaagatgcaggggctgatgcgtgaggtgtggcgcagttgtcagaaatgatctgctaatctgcgcgggttcaatctcgccctttagcctggactttcaccatgaccccatcctccgttcagccgcccctggaaccgcagtccgtgtgccacccgatcaccagcagcgcgattttcatggtcgccactgtcacccccggcagcgaggacagggtacgcgcctggtgcgccgatatcgccgggctggtgcgctcggtgggcaagcgcgtgccggcgggcaacctgacctgcgtctgcgggtttggctcgaatgcctgggaccgcctgttcggcgcgccacgcccggcggcgttgcacccgttccgtgagttcggcgtggcagggcgcatggccgtgtcgacaccgggggatatcctcctgcatatccgcgccgaacagatggacctgtgcttcgaactggccacccacatcatggcggccctgggcgacagcgtgaaggtggtggatgaggtccagggtttccgctatttcgacatgcgcagcatcatcggctttgtcgacggcaccgagaacccggtagggcgcaaggccgagggtttcaccatcgtcggcgatgaagacaacgagtttcgcggcggcagctacgtgctggtgcagaagtacctgcacaacatgaccgcctggaacggtttgacggtggaggcccaggagaaagtgatcgggcgcaccaaattgtcggatatcgagctggatgaagaagccaagccaagcaactcccacagcgcattgaccgtcatcaccgacgagaacggcgaagaagtgaagatcctgcgcgacaacatgccctttggccgacccggagccggggagtttggcacctacttcatcggttatgcgcgttcgccgcagcccctggaattgatgctggagaacatgttcgtcggccgcccggtcggcaattatgaccgtctgctggatttcagcacggcagtcaccggcggcctgtttttcgtgccctcggctgacctgctggaagaattggccgaccgaaccggcagtctgtaaggcaacacagtacaaatgtgggagggggcttgcccccgatagctgtgtgtcagtcaacttatatgcagctgacactgcgcaatcgggggcaagccccctcccacattggattattggtggtttgagatttgtgttgggtcagctcaacagcccagtgctgaccgccacaatcaggaacacccccagcagcgcacggtagatcacgaacggccaggtggagaaccgctccaggaacttcatcaggccccagatcgcaaagaacgccgagacgctcgccaccaccagaccgaacagcaagtgcggccaggcatgcgccggcatgtcggcgtgcagcaacacccacaactccttcagcccggcgagggcgatggccggcaagcccagcaggaaggagaagcgcgccgcttcctcacgcttgaaattgaggaacagggcagcggtcaacgtggagccggagcgcgatacccccggaatcaacgcaccaatctgcgcaatcccgacgatcaacgcatcgcgcaggcgcatttcgctcacttcacgggtgtggcgtgcgcgaacctccgccaccgccagcagcaccgccatgactacgcaggaaatgccgatcaccatcagcccgcgcagcggcgagttgcatgcgttcaaggtcgaggacagcgccaggccggcaatcccgatggggatggtcgccagcacgatcgccaccgcgagtttgaaccagcggtcgttgtagtcaccccgacgtaccgcgccgatgctgccggtggtgacctggcgcacatcgcgccagaagtaactgaccaccgccgccagcgccgccagttgcatggccgcggaaaacgccgagccggggtcttgccagccgagcagggcgggcaccacgcgcatgtgggcggtggacgacaccggcagcagttcggtaatgccctggatcacgcccaggatgaagatctgcaggtaatccagggaggcaaaacccacatccaggccggcggtacacatgttggtcaaaataggtgtccttgaagagcagaggcaaatttcacgaagtttattcgaaatgtttcaaggtttcggcagaggcaacacctatttgcaatcggttcagcaagtagaaaggttggcctctgcccgtgttttgtgaacaatggcgccctgcgttttttcaccgagagccccatgcctgaaaccaccgtcgaattgatccagaccggccccgaagaagccgagctgatccgtaatctctaccagtactacgcctatgaatcgtccgattgggaacaggaagatgtggaggccgatggccgtttctatatccatgacgaacacctggcccgctactggcaagacccgcaatggagcgccaacctgctgctggtggatggctacatcgccggcttcctgctgatcgaaggcagcgaactgccaggcatcgacgccctggaactggccgacctgttcatcctcaagcgctaccgccgcaaaggcattggtcgcgccattgccagccaggtgctatgcagcggccaggccaattggctggtgcggttctatgaccaggacgaagtgtcccaggcgttctggcgcaccgtgctggataacctgccgcgcccggtgcagacgatagagctggaggatgacccgcagttggtcagttacctgatcacgcgggcggcgttgcattaaaagcctgctgcatcacctgcggcggctggccgaacgcccttaaaaacgcctggcgcatacgctcgcgatcaccaaagccggtttcgcgggccaccacctcgaccgggtgacggctggtctccatcagcgcccgggcggcttccacacgcagggcttcgatggctttggccggtgtctgcccggtttcctcgcggaatacccggctgaactggcgtgggctcagccgggccacatcggcgagggcttctaccgagaggtcgtgggtcaggttctcacgggcgtaggccagggccagttgcacgcggtctgacttggggtccagctccaacagcgccgacagttgcgattgctcactgccgcgacgctgggcaatcaccagtttgcgcgcaatgcgccgggcgaggtcgctgcccaggtcgttctccaccatggccaacgccaggtccacgccggcgctcatgccggcaccggtccacacctggccgtcgacgataaacagcttgtcttcttccaggcgaatgtccgggtagcgcttgcgaaaggccggtgcgtgaatccagtgggtggtggtgcgcttgccttcgagcagaccggcttcggccagcacgaagatgcccatgcacagcgaggccacgcgccgcgactgggcggaggcggccttgaccaattccagcaggttggcttccggcaggcggaattccaggtagccgctgacgatcagcgtgtcgtagccctgcggccggatcggcgtggtgttcacggaaaagccctgggacgtcatcaccgcgccgccactctccgacaccaggtggaactcataggctggctcgccgcgcagcaggttcgcgcactcgaacaccgaacccaggctgaggctcagggattggaagttcgggtaaaccatcagcgcaacgctgtgcatcgtcattctccaaggggcgcgggagaggggattgtcggcgcgtgccgggtaaacggcaactgccttcgcggcatgtccggaatccttgcggatctgacattgtgcgcgatagccccgactcctaacattccctcaacgaactagacgactggtctaatcggacgggatcaagcatgagcagcgaaaccaaaagtgcaagacagaccattctggacaccgcgcaacgtattgtcggtcgcaaaggattttctgcggtgggcctgaacgaaatactgcaagccgccgaagtccccaaaggttcgttttatcactacttcaactctaaagatgcgtttggcgttgtattgcttgaccactacttcgaccactacgtgcagggcatgcagcagttgtttgaacagccgggcatgagccagcacgccaagctgatgcgttattggcacagttggatcaacaaccagaccggctgcaccgacgcgggcaaatgccttgccgtcaaactcggtgccgaggtgtcagacctttcagagccgatgcgcctggccctgcaacgcggcaccgcacgcaccatcgggctgctcgccgaggccttgcagcagggtgtcgaagacggctcggtaacgcttacgcaacaccccgaaagcctggcccagcgcctgtatgcgttgtggctggggaccagcgtcatgagcaagatcacccgtacagcggcgccgttcgaccaggcgctggggttgacccgacagttgttggggcatccgcacgacactgacactcacacctatcgaggcactggaaaatgaaagtattaatggtactgacctctcacgaccagctcggcgataccgggcgcaagaccggcttctggctcgaagaatttgccgcaccctattacgcgttcaaggacgccggcgccgacgtggtgctggtttccccggccggtggccagccgccgctggacccggtcagcgacctgccggacttccagaccgaacagacccaccgcttcgctgccgacccagccgcgcaacaggccctggcgaccacgctgaagctggattcggtcaacgccgatgacttcgacacggtgttctacccaggcggccacggcccgctgtgggacctggcagagtcgccggtatcgatcgcgttgatcgagtccttcgagcgtgccggcaagccgatcggctttgtctgccatgcaccgggtgccttgcgtcacgtcaaggcagtcaacggtgagccgctggtcaagggccgtcgagtcaccggtttctccaactcggaagaggccgccgtggaactgaccgatgtggtgccgttcctggtggaagacgagttcaagaagttgggtggcctgtatgagaaaggcgctgactggcagtcctttgtcattaccgatggcttgctcgtcaccgggcaaaaccccggcagttccagcgatgtcgccaaggccctgctgaaactcaccgcttaactcaataaaccgctgcaagcattggcgacttgtaaaagtcgccaatgctttagcgcgcccgctatttggaaattattcaatgaatcactctattttaagtaccccggtaaacctggggcaccacacgctgaacaaccgtattgtgctgccaccgttgacgcgccagcgcagcgcccagccgggcgatatcgccactgacttgatggccgagtattaccgccagcgcgccagtgccggcttcatggtcagtgagggtacgcagattgaaccgcgtggccagggttacgcgtggacgccgggtatttatacgccggcgcagatcgacggctggcgcaaggtcaccgaggcggtgcatgccgaaggcggggtgatctttgcccagttgtggcatgtcggtcgggtgtcccataacgccttgcaaccggacggcgccgcaccagtggcaccgtctgcgctccaggcattgcaggccaaggccttcatcgaaaccgcgccgggcgagggtgagttgaagcaaccgccggtgccgcgagcgttgaccaccctggagatcgaggagctggtcgggcactacgcccaggcggcgcgcaatgcattggatgccgggttcgacggggtggagatccactcggcgaatggttacctggtcaaccagttcatctccgcccattccaaccagcgtgaggatgaatacggtggctcgctgcacaaccgcctgcgcttcctgcgcgagatcgtcgaagcggtgaccgccgtggtcgggccagagcgcctgggtgtgcgtttctcgccgctgttcagcggcaccgaccaggaccgggtgtacatcggcctggtggaagatgacccgcaccacacctatatcgaagcgatcaaggtgctggaggcgtcgggcatagcctatgtgtcgattgccgaagccgattgggataacgccccggtattgcccgaatcgttccgccgagcggtacgcgacaccttcagcgggcggatcatctatgccggtcgctacaccgctgagcgcggtgctgatctggttgaagcagggctggcggatttgatcgcgttcggccggccgtttatcgccaatccggacttgccgcagcggattttcaacgactggccgttgaacccgctgcgggcggaagggatgtatgggggcggcgaagcgggttacgtcgactatccggtgttcgccgggtaatcaaaccacccgcaacacaatcttgccaatgtgatcgccaccttccatccgcgcatgcgcctgatcggcctgggtgtaatcgaacacctggtcaatcatcggcaggcagcgcccggctgacagcaccggccatacatgctcgcgcagttgctcggcgatggcggctttctcgtccttggtgcgggcacgcagcaacgagccggtgacgatggcgcgtttgccgaggatggtcagcaggtccacgtcattggccttggcgccgccgaggaagcccagcatcaccaggcgtccgtccatggccagcgccttgaggttattgttgaggtaggaggcgcccatgatgtcgaggatcacatcgacgccttgatctccgatcacctcggcaaaatcctgctcgcgataattgatcgcttcagcgcccaaggcacggatggccgcacatttctcttcgctgccggcggtggcgaatgcctggataccgaactcgcggcacagcatcagcgcggtggtgccgatcccgctggtgccgccatggatcagcacgcgctggcccttgtgcgcgccgccgatgccgaacaggttggcccacacggtaaaaaaggtttccgggatagcggcggcctgaatccactccatgccttcgggaaccggcaacgcctggctggcgggcaccgcgcagtattgggcgtagccgccgccgttggtcagggcgcataccctgtcgccgattgcgtattcgctgacccctgcgcccagcgcgaccacctcgccggccacttccaggccggggatcgggctgaagccgggtttcatcgggtacttgccggcacgttgcaaggcgtcggggcggttgaccccggcggcgtgcacgcggatcaggatttcgccgggggccggggagggcaccggttcctggcgcggcttgagcacctcggggccgccgggcgtggtgatttcaatcagggtcatgtcggtaggcagggtcattgggcgaatcctgagtattttcgatggctgtgagcataaccgagattggtgatgcaataatgctgcgaatcagcatgataagagtgcatatatgcagcagtggaggaggcaatgaactgggacgacgcacgggtattcctggcagtgtgccgcgaaaacacattgcgcggcgccgcacgggtgctgggcgtcgaccaggccacggtggggcgccgggtcaacgccttggaaaagtccttgaacgccaccttgttcctgcgcacctccgagggctacgcgctcactgcggtcggcgaagcagcgttgctttcggtggagaaaatggagcgctcggccctcgacctggagcgccagatccagggcctggatgaccgcctgaccggcaccgtgcgggtcagtactaccgattccctggccatcgatttcctgatcccggccatcgcgcgcctgcacgaccaacaccccgatgtgcgcgtgcaactggacgcgtccacccagatcctcagcctggccaagcgcgaggccgatatcgccgtgcgcaaccagcgcccggataaccccgacctgatcgcccggcgcattgcgcgctggccgctcgggttgtttgcgtcccagggctacctcgaccgccacggcgcacctgagccgggcagcctgttcgaaggccatgacctggtggtgtaccaacctcacctgcaaagtcagaaggacatgaccctggtctccgaacccttgggccgtggacgcattgtcgcggccttgagttccagcctgctggtgcgccgctccattgctgccggcatcggcatcggtgaaatcccggtgtgcaccggtgagcgcgacgggttggtgcgcctatggccggagcgcacgcggccactgccgtacgacgtgtggctggtgacccacgccgatctgcgccacaccgcacgggtgcgggcggtgatcgaggagattgtcgcggcgtttgccggcacgggggagtgaggtcagcacaggcttgcaagcgcttaggtggttcggtcgacacaatcgatgtttgtggcaatcaaccgagagcacgtatgaacgaatcgacgcgtcaggacctgggattattgtttctgcggatcagcggggcgctgttcctgctgtgggtgcatggcttgcccaagttgctcaactacagcgagcaattgaagctgatcgaagacccgtttcacctgggggcgaacatcacgttgttgctggcgattttcgctgaagtgctgtgcccgctgctgatcattgccggggtgctggtgcgcctggcgtgcctgccgatcctggcggtgctgttgatcgccctgttggtggtacacccggagtggacgctgttcgaagggcagttcggctggctgctgttgatcatcttcaccaccttgctgatcagcgggcctggtcgcctggtcctgagccaacgtttctcctgagcaaaaaaaggccgggcaagcccggccaaaataaggagagggtggttcaggcgtttcagcgttgcaggaacgccagcaggtcttcattcaactgctgcgcatgggtcacggcgaacccatgtggcgcgtccttgtagactttcagttctgcgcccttgatcgaagcggccgccactttaccggtggtttcgaacggtacgatctggtcgccatcgccgtggatcaccagggtcggtacgtcgatcctggtcatgtccgggcggaagtcggtttcggagaacgcggtgacgcaatccaccgttgacttgagggatgccagcatcgccacttgcagggtctgggtcagcacaccgtcagagaccttctggccctggttgaggccgaagaacggtgtgttgaagtcgctgatgaactgcgcacggtccttcaacaggccggccttgatgccatcgaacacttcagtcggcacgccttgtgggtagtccggtttctggccgaacaacggtgtgactgcacccagcagcaccaggccggccacgcgcgcgctgccgtggcgtgcaatgtagcgagccacgtcgccaccgcccatggagaagcccaccagggtcacgtccttgaggtccaggtgttcgatcaactgggcgatatcgtcggcgaaggtgttgtagtcgttgccggtccacggctggtccgagcggccgaacccacggcggtcaaaggcgatggtgcgaaaaccacggctgctcaggtattccatctggtattcccacatgtcggcgtccagcggccagccgtggctgaacagcacgggtttaccgctgccccagtctttgaaatagatctgggtaccgtctttggcgacgaatgtgctcatggaaaactccttgggtcgagggaaaaggctcggcatcactattggtgtaaagcgtacgtcgagcttgtacgggtgtgcttggttggggttaccagctgaatttcagctcgacccccaggtaattgctgtcgtcgcccccggcatcgcgcagggtctgccccacgtcgtagtgcacggcctcgacggcgccggtgaggttggggctgaacacatagtcggtgcgcacttgcgcataggcaccggtccagcgatcgccctggcctgcggtgccggccaccggcaggttgggctgggtgtagaccgcatcgctggtggtttggcgccacagcaggccgatggcggtttgcacgctgagcttgtcgatcggcttgagcgtgatcgacggcttgacgtgaatcaggttgctgtagccggtgtagcccgccagggaaaagtagtagccgttggggaacagcgggttgaaggtgccgacggtgccatccccggttttgcggtcgcccgaggcgatgtccagttgcaggccgatgcgcggcttccaggccacgctgtcgaaggtgtagccggtacggctgccaccggcccaggcgcgaatgtccttgttgccgaccgagccgctttgcagcatcgcttcgatgtcccagtcaaagcccatggccgagccgccaaggcgtgcgtcgaacagatggcgggtctcgtcgccgtcggcgtccaggtaatgggcggcggtgcgctcatacacgccgtagtaggcggacaactcgttcttgccacccaccagtcgctccacgcggaccatgtggaagcgcgcatcgctgttggatttgtcgtcgaagtgacgcccgtcctgatactgcaccggctggctggcgatcccgataaaacgccagttggaggtctcccaatcgacccacagcgcatcgaaggactgccgcacattcgggccgtcccgcgatgagatgaagcgctgcaggtcgaaggcgaaatcctggcgcccggcacgcgccttgagggtgccgctgctgaaggtattcacatactcggcgaaggccaggcgcagatcgacgcggttctggtcggcgccgccgatcgtcgtcttgtcgtacgcccgcacatcttccaattgggtgaacacccgccagtgctcgttcagatgcaggtcggcgtggacctggaagcgttggatcaagtagcgatcacgcttcatatcccgcacgccgaagccactggcatcgttcatctcgaaacgctcgcgcaacgtcgcgcccagggacaggtaggtgtaggggtttgcgctggacagcgggatgtacttcaagctgtccagcggctgcgtgcgcagcgccgggtcccgcagcaccgaccagtcttcctgccagcggttggccttgatggccgggcgtgtcgcttgctcgtcggcgtggacgctgccgacgagcagcggccacagcacggccaggccccagcctgtgcgacgcgtcattttgcggcgttgagttgatggatctccgcgacgtagccgcccggaaactccaccaacgcactgcgacggcctttgctgtcgaacgcaggcaccaagactttggcgccggagccggtggccttgcccagggtggccgtcaggtcagccacttgatagccggtggtctcgtggccgaacgggtagggcagttggccgttggtgaccagcaccgccatgcgcccgaacggcgattcgatgtcgacgcgacggtagttaccgttggcttggccgatatctgcacctggggcgtgtttgtcatccgccaggactttgccgtgggcgaagccgataaacgctttgataaaggtgtcggcacggtcggcactgaggtacacgcggttttccggcacggtctggaacgcggcgtaatccggggtcttggtgtgccagtaaagctgcatgttcacgccgcctggccactgcaccacggcgtcacgcccgatcgggtcgggaaagttgctgacgatcaccgccgcgccgttctcccgggcggccttgagggcgaggtccatgtccttgaccagatagccgttgcgctcctggccgaacgggtgcgggatcggcgtggtgaaaccgaacagcgataccgtgccggcgggggtctgtagcagttgcgaagtggtgctgctgggcaccggcagcacgttcaccaccacctggggcgtgcttttaccgccgaaggtggccaggaaactctgggcaaagcggtcgacatcggccggagcgacgtagacgtggctggtgtcgtattgcggggccacggcgaccgcaggcgttgcggcgaaggcgctgttcatcattgccccggccagcaaggtgactgccagcgataccgtcctgacttttctacacatacccactctcccgcgttttgagaaagtctcgatcttaggggcggggcagaccggcggattgtacggacgtgctcggttgaacgattcagcgtctatgctggtcatcgtagaacggtgtcatccaggaggctcaggacatgctcgacttctgcgccaggcacgggattgtctcggacatcgagatgatcgatatccagggcatcaacgaggcgtatgaacggaggctcaagggcgatgtgaagtatcggttcgtgatcgatatggacagcttgaaaaaggaaagcccggcggcttgaaatgcattctccaaaccgctgtagaacacctgtgggagggggcttgcccccgatagcagtcgggcagtcaccgcatcattgactgacccgccgctatcgggggcgagccccctcccacattggtttgcggtgtgtctagaccgagaggtgttcgtacagaattgtcgctcccaccagcatcagcaccacaccaccgaccatctccgcacgcttgcccaccaccgttcccagtactcggccaagcatcatcccgatcgtcaccatggtcatggtcgccaggccgatcgccgccgccgccaccaggatgtttacgtctacgaacgccaggcccacgcccaccgccagcgcatcgatgctggtggcgaaggctgtgacggcgaggatcatgaatgagtgctgggtcggcttctcggcctcttcatcatcggctttgagcccgttccagatcatgtgcagccccagcccgaccaacagcgtaaacgcgatccagtggtcccagtcttccacccagcgcgtggcggcgtggccgatggcccagccgatcatcggcgtgatggcttcgatcacaccaaagatcaggccggcgcgcagggcttcggtgagtcgcggtttgtgcaggctggagcctttgccgatggcggccgcaaaggcgtccgtggacatggccagggcgagaagaatcagggaaatggggttcacggtaaggcttccagtcgggctatgggacacaacgacactcccacgcgcccgacttgaggcatggaggtgtcgctggtctcaccaaccgaaaagacggtgttcgcaccacggcaggttgccgaatatgttgatacgaacgcttccaacagggtcagaagccggttactccccaacgaggtggacgatgttaggcgactgggtatgaaaattccgtcaaaaggcctgtggcaagccctctcgccacaggggacttatcgcccgttttgaaaggactggccctcaaggccgctgcggcttcaccgacgtgccgaaggtattgcccatgcgcacgctggtcgccgccggggtggataggcccaccgcgttcggcgggcgtttttcgatggggaggttctgcgcctcgcggttctttttggccgccttggttgcgttcgtgtcgttgcccatctgctggctcaggcagccatagtcgggggccttgtagccgtccacgctgacctcggcgcacttgccggcggcgttttcggcatgggccagcaagggcagggcagcgcacagcaacaggctggcaagggtcggcaaggttttcatcgggcctcctggcgggcccgaaggagtgggccggtaaggcttggaagtctagtgcagcgggcctctcatcaccgtgatgttttttttgctatcaccgtaacatcaggttcataaactggcctcaggatgacggttttctagggcgcgtcggccgtgcagcgatgcagaacagggggtgaacacggagcctggaggcgcttgatgtgcgccctggtcttgctgttgctgctggccggtggtcgcgcggcgcaggcagagtcaccgctgctgccgttgaacctgccggcgcaggacctggaacatgcactgcaagcctacagccgtgccaccgggatggcggtgctggtggaccgtgaattgacgcgcgggcggcgctccatcgcagtgcgcgggcgcttcacggcgcaagaagcactggcgatattgctgacagggagtggcctgatggcccgttatgcacgcagcgatgcgtttaccttgcagaccccgcaagttagcccaccgcccacgacccggggggcggcggcacgcaacgcggcgcggatcaacaacagttatgcgacggcgttgcagcaagccatcgagaccagcctgtgccgctcgccgctgacccggcccggcagttttcgcgcgctggtgcaggtgtgggtcaacccggatgggctgatcgaacacagccggttggtgagttccaccggcgacgaacaacgcgatgaagcactggtgcgcagcctggcagcggcacgggttgaacgcccggcgccgagctcgctgcgccaaccggtgactttacttttgatgcctgacacaacaggaacgcgcatggaatgcacagccgcaaaaggagcctcggagggatgaaaaataccgggcacagtacgatggtcagcctgttcctggcctcttacgaagacttcaaggtgcggttgcgcaagcgcctgggctcggaggacctggccaacgacgtgctgcacgagacctacctgcgggtcgaccgcatggacgtgccgccgaacctgcaacagcccaatgcctacctgtaccgcatggccctgaacatcgccgccgaccgccgccaggccgacgcgcgcctgctcaccggcagcgaggtggaagagctgctgcaaagcgccgacgaagcccaggacccctcgcgggtagtgggcggccagaaagaaatccaatccctggtcaaggcgctctacgaattgcccgcgcgccggcgcaagatcctcatcgccgcgcgcctggaagaggcgccgcacctggaaatctcccagcgtttcggtatttccacgcgcatggtcgaaaaggaaatcaaggccgccctgggccactgtgccaagcgcctggaaagaaaagtgattcagcggttcggtcccggggccggaaaaccgtcttagtgtcgagtccctgataaatccgtgagtacgtgcgcgcttgaatatttttagcctctccaccgcccggcagtccgccgccagccccctgcacgatgaagcccgcgactggctgctcctgctgacctcgggccgcgccaccgtggccgatgccaaggccctcaaagcctggtgcgcgcagagcccggagcatgcccaggctttcgagcaggccaaggtgctgtggcaacaactggcgccggcgcttgatcaagtgtcgcaaccgcgcagctttggccgccgtgccttcctcggcggcgccatcgctgcgtcggcagccgtggtgatggtgcgggtcggtgtaccgggtggctttgccgggctcacagcggactatcgcaccgaagtcggcgagcaacgccaagtgctgttgagtcaaggtatcagcctggaactcaacacccagacccgcatcagccgggtgggtgaaggcatcgaattgctcgaaggcgaagtcgaggtggtcacccacgttgcgcaaccgctgcgggtccaggccggtgaaggctcggtcagcgcggtgcaggcacgcttcaatgtgcgcaataccgaccaccgggtatgcgtcacctgcatcgacggttcactttcggtggacatcgccgggcgcagcgtgcgcctggacagcggccggcaactcacctacggcgcggccggtgtcagcgaggtgacaacggtggacacccaggcggtggtggcctggcgtgaacaggtgctggtgttcaacaacgccacgctggcgacggtggtggacgagatcaaccgttatcgcccgggcatgctgctgctgttgaacagggaactgggccagcgccgggttcaggcacgcttcagtttgcagcagttggcgggcgtggcgttgttgatccgcgatgcgtacggggccaagtgcacggagttgccgggtggggtggtgttgttgagttgaggggctgccgctcgtcgggtaactccaatttttacgatgtaaatggaccgggccagaacgctaatctacgcctgtcgctttcaggtatgcctgtgtgctcatgggttgagccaccggtctttttcctctgacagatctcctttcttgtcctctctgaattgtcattctcgtttgtaggggaaaggactttcagcgtaagaaaaaaccaggaaatgtacgtttcaagtctcacttcctatccggtttcttccttcgactgacattgttcggaagcatctgacagccctccaacggctgtgtgacagacagggcgacgccctcaggaacgccgaattttttgtaacctttcctgttttccttaagcgtttcagcctcggcagcatgggtgctctttccatttgagtacctgtgtgagggtgaaaggatgccggctgtttttcgacctgcgctgctggggatagcgctgttttcagggccgcttcttgccgcgtcccccgcgtcccccggcgaccgcgaattggcccgtgagcgtcagcagcaagtgttggaagagcagcgtcgtcgccttgaagacctgcagaacctgcccggccaaatcgctgtgccaacggctcccgcgctgctggaagacggccagtgcatcaccgtcacgcgtatcaacattgaaggcgcgacattgctgcccgaaggccagcgagaggcgctgctgcaaccctggcaggggcgttgcctgggggtgcctcaactcaacgccgtgctcaaaagcctcaccgatcactacctgcatcgcggctacgtcaccacccgcgcctacctgccacagcaggacctgaaacatggcgaactgaacatcatcgtggtcgaagggcgccttgaagggctcgacagctcatcgctggccagcccgctggagtccgccatgacctttcccggcaccgtaggggaggtgctcgacctgcgcgagctggagcagtgggtggatcaactgtcgcgcttgccctcgcgccagccgcagcttgaggtgttgccggggcaggcagtggggggcagccgcgtgacgctcaaaggtgagcgccgcgaaccctggcgtgtctcggccaaccgcaacaaccatggcgatgccagcaccggtcgccagcaggccggtatcggcctggattgggacagccccctgggcctggcggatcaattgaacctgcgggccagccgcgacaccgtcagcgaccgctggcgccattcccacagccagaacctgttctacagcctgccgtatggttggtggacgttcaatgtcagccacagccaaagcttctaccgcacgcgcaacgacctttccgggtttgccttcgcactgtcaggcgagacgtccagccagcagttgcgcgccgagcgcgtgctgcaccgcgataacctgggcaagacggcgttcagctttggcctgagccacctgcggacccgcaactacctggaagacgcgttgctgcgcacctccagccatcgcaccacggagcgtcaactgggcttcaaccatggccgccgcatcggcaacgcctttctcaacctcgatgccggctggcaacagggcatcggcgccctggacgcccagcgcgatctctctacacagcgcggcgcgccgacctcgcgctatcagaaatacaccctgaccctcagctatttgcaggcctttcgctggctgggccagcactggagtgtcgacagccttgccaccggccaacacgccgaagacgaactctatgggccacaacgcctgagcgtcggcggcctcggtgcggtgcgcgggttccagcaacagaacctttcgggcaatagcggcggctactggcgcagccaggtgcgctggcgccaaccggtggcctgggaggcgctgcggccctgggtgcacgaagtgggcgtgggctttggctacgacgtcggagtgatccgccgtggcccgcacaaccctgaagtcgccgggcgccttaccggccatgcctgggaactcagcgcacggggtactcaccttgcggcttcgctggtgcttgcccgttccctggaacgcccggccatcgttgagcgtcgcgaacacccggtctacgcccgaatcgacctgtttttctgaataacaacaaggaacctagcctatggacgtgcgccgcccgttttaccagtgtctggccctgagcctcacaggcatcatcttcctcaacccgattgtcgcggccgccgccgagctgagcgtggacccggccagccccggcaccagcctcggccatgcgcccaacggcgtgccggtagtgaatatcgccgggcccaatggcagcgggctgtcccataacctgttcaccgactacaacgtcggcagcaacgggctgatcctcaataacgccacccaggccacgcaaaacaccgagctcggcggtgtgatcctcggcaacccaggcctgcaagggcggcctgccagcgtgatcctcaacgaagtcaccggtggcaaccgcagccacttggggggctacaccgaagtggccgggcatgccgcgcgggtgatcgtcgccaatcctcacggcatcacctgcaatggctgcgggtttatcaatacgccgcgcgcgacgctgaccaccggcaagcccgtgatcgaaggtgggcggctggatcactttcgcgtagacggcggcgatattgcgctggagggcgccgggctcaatgcccgcaatgtcagccagttcgatctgatcacccgcacggccaagctcaacgcgcaactgcatgccgaccagctcaacattatcaccggccgtaacgatgtcagtgccgacactttgcaggcccgtgcccatgcggaagatggccgggacaaaccgcaactggccatcgatgccagcgccctcggcggcatgtacgccgggacgattcgcctggtgggcactgagcagggtgttggcgtaaggctggcgggcgatatggccagcaccgccggcgacatcgtgatcaatgccaatggcggcctgagcctgtcccacaccaccagcgtcggcgccctcaccgccaaggccgagtcgatcgacttacagggcccgacctttgcgatggctgatatcgacctgcagacccagggcgatctggtggtgcggcagagcctggccagcgccgggaatgtcagcctcgaaggccgcacggtgagcaaccagggcaaggtcgtcagcggcatcctggaagaccggcgtatcgcgggcaaacagctgagcatcaaagcccagcgcctggataacccgggtgaactcaatgccagtggccacctggaaatcaccagcggcagcctcgataacagcggccagatcgccgccgacagcgccaggatcgaagcccgccaggacctgagaaacactggccaggtggtcaccgccggccaacttgaaattgccgccagacaggccatcaaccatgccgggacgctgcatgccgaaggcgatttgagcctggtcgccgacagcgtcgacaacagcggcaagatcgtgggggcgggcagtgcgctgagtattgcggccggcacgttcaccaacgcgggcgaactgctcggcgacaaccacctgcacctgcaggtcgatggcgacctgaacaacagcggcctgatcgccgccaaaggcgatgcctatatcagcgcatcaaaccttacccaagaccacggccagattctcagcggccaagacatccaactgcgcgtgcgcgatgtactgcataacctcggcgtgctcagcgcagcgcggcatatgcagattaatgcggctcaactgaataaccccggcacgctcggcagccaaggcaacctcctgctcactgccaacgtcaccaacagcggcctgctgttcagcggcggcgacctgcatgtgcgtggcgagcatttcagcaatcttgaaggtgacctctacagcgtcggtgatttcagtttcgccggcacgcgcttcagcaacctctccggcaacgtggaaaccgaaggcaacctgcacatcaacgcccgcgagtttgaaaacgcccgcacccaccttgtcctcgaacgcgagctggtcggcggtagtatccaatgggtctgcggccagcactgccacggcaacgacagcttcaagcgcggcactatctacatcagcgaaatctggcgcgaaaccgccgcgcccaactccaccagggcggcgcgactggtggccggcaaagacctgcgcatcgacgcgcagaccctggagaaccgctacagcctgctcgccgccaatggcgacgtgcacctttccgccaaccgccttatcaaccagggcgcggcctcccagaccggcatctccagcaccatcatcggcacccccggtcgcatcgacaaagccctgtgggaccagatggaattccacgacctgccggccttcaataacgcacccttcgaccccgtgcgttttgccgaactcaaggcccgctcgaccggagaggggttcagcaaccccggcaccctcaccacctggcgcgaggatggccgcgaagtctatgccgccacgctgcaagccggcggccgcctcaacctgcaggccaccgagtacctgcaaaacggcaccctgcgggaaaacaccctggcgcaactgaccggcgacattggccacaaccccaacgacctcgaactgagccccgatcgcctcagcgatgacctgacccaaccacccgaattccaactccccagcggtaaatacggactgtttatccccagcaagaatccgggcagcccctacctgattgaaaccaatcccctgttcacccacctggccaacttcctcagttcccagtacttgctcgacaagatcggctacagcagcgacgaagcctggcggcgcctgggcgacggctactacgaaagccgcctgatccgtgacgccgtgctggcgaagaccgggcaacgcttcctcgccgggcagcagagcgacgaggaacagttccgctacctgatggacaacggtctcagcgcccgtgacagcctgcaattgagcgtcggcgtaggccttaccgcgcagcaggtggcggccctgacccacgacatcgtgtggatggaaaaacgccaggtgcagggtgaagacgtgctggtgccggtgctgtacctggcgacggtcgacgccaataacctgcgcgggggcagcctggtgcaaggccgggacatcaacctggtcagcggcggcgacatcgtcagtgtcggcaccttgaaagcggaacgggagctgaccgccgtcaccgacggccgcctgctcaatggcggcacgctcagcgccggtgaacgcatcagcctgctggccaccgacagtatccgcaacgcgatggccggcgagatccgtggcagctatatcgaacttaccagcgtcactggcgacatcgtcaacgaccgcaccgcccatgccaagcatcagggcgacggcacccttgtcacccatctcgaccaggcgggccagatcagcgccgcacagcgcctcacgctcaacgccggacgcgacatcaccaaccgaggcgacatcaacagcgctggcgatgccagcctgagcgccgggcgcgacatcaacctcatcgccgtcaccgacacccaacaggtgcgcaccacggaaaacggcggccaccgggtcacccaacacagccgcaccgaacagcttggcgccaacctcaacgccgccggcagcctgagcctgcacgccgggcgcgacatcaccctattggccagccaagccaacgccggcaaagacctgaccgtcgccgccggtggcaacctccacctgttggccgctgccaacgacaccgatcacgcggtcaacagcaaacgcggcggcgccaaggtgcatgagcaaaccacccaggtgcgtcacgtgggcagccagctcaccgccggcggccaactgagcgccagcgcggggcaagacatcgtgctgcacgccagccaggtcaacagcgccaaggacgcgtatctggtggcgggtgggcagttgcaactgctgagtgccaatgacagcgactacagcctgtatgactacaagaaaaaaagcagcttcggcgccctcaagacccaacgcgacgaagtcaccgacgtgcgtgcggtgggcagccagatcaccacaggcggcaacctcaacctgatcagcggcggcgatcagctgtatcaaggggcaaggctggaaagcgcggcggatatcgccatcaccagtggtggggcggtgaccttcgaagcagtgaaggacctgcatcaggagagccacgagaagaccaacaacaccgcattctgggtggcatccaagggcaagggcagcactgacgaaacgctgcgtcagagccagttggttgccgggggcaccatcgcgatccaggccgtcgacggtttgcagatcgacatcaagcaggtcaatcagcagagcgtcagccagtcgattgatgcgatggtcaaggccgacccgcaattggcttggctcaaggacgcagaacagcgcggggatgtggactggcgtcaggtcagggaagtccacgacagcttcaagtacagccactccgggctggggccggcctcgcaactgatcattgccatcgtgatgtcggcggtcatcgggcccatggcgacggccgcagcaggcggcggtgtcggcggcgccatggtgggagcggttgcgaccggcgcctcgaccaatgccagtgtcagcgtggtcaacaaccggggcaatctcggtgccgtgttcaaagacgtgacgtcgtccgatgccctgaagggctatggggtttcggcgatcactgccggcttgacggtgggttacttcgacccgtggaccggagcgcagacccataccaccatcagcaaggtggccacctccggctcgctgggcacctggagcggcgtcggccaattcgcggccaaccaggcgctgcagaacggcacctctgtgttgctgaacaaagccctggggcagggcggcagtgtcagtgacgcgctgaaaaatgccttgttcaacaccttggcggcggccagtttcaacctggtaggggactacacgaaaaacgtcctggcggacggctcgttacccaaggtggcgatccacgccatggtcggtggcttgctggcagaagccactggcggcgacttcaagaccggcgcattggcggcggcggcaagcgaagcactggttggccacctggatacgttggtcaaaggcaacgacaccctgctcaccatgagttcgcagatcgtcggcgtactggcggctgcggcacaaagcgacaccgacgccgccaagctggagaccggcagctgggtggcgaagaacgccacgcaatacaactacctgtcacacaaccaactggaacgggccgccaaacagatagcccgatgcaccgacgcctcctgcattcaggacgccacgcgcaaattccaggaactgagcctccagcaggacattgacgccatcgtcagctgccaggccgaccccagctcctgcgcggcaagctccaaagaagtcgccaacaccatggcgaacctcaacgccatccgcgacatcgccgactacgcctcgcccgacgcccgggaggcggtacagagcctgatcaacggcaattacgaatttcaggaaatgctggcgaccgccacgaccgagcactcggtgggcgcgatggtcgagtcgctcaagtcgaagtgggcactgagcgatgctcaggcgcaggacattgcgcacaatctgaagatcgcactggcggttggggtggggactgcggcgggggtggtggcttataggcgggctgtggcgggtgggggggcgaaaggtgaagctgctgggttactgccaaagcctggaagcacatctctacccgtcaatagcttcggggctgatgccgattttaaggtggactcgaaccagctaggtacaaaactcggtaaacatgttaaagactatggtgggaatgcggccaattcagccgatcggaaaatggtgcttgatcaaattaatgatattgggaataacccagataaagttatccctggaactttttccggacaaggaacaaatggtacgcgtggagatgtattcttcaggatcaaaggtaatgatgttgttgttaccaagcctgacggaacgtttgtgactatcttgaaagatggggtgactcagaatacatctgtaaaaagtgctttgaagggggaagtaaggtaatgagtatttcatatcttatgaatgcttggttagtgagggcgttaggacgtaagctgctttcagtaaatgcattgcttcatgtgttcgagtcttatagaggctcgatccctcaagaggtttctcttcgatttgaagatttggagagtgggaggctatattgcgggagtgatggtgtgtcgctatgtttttctgaagcgcctattgctgaatgcgatttgggtgagtacggaaaattgattgatttttgtgtttctagtggaagttatttttttgatgttgtcgggcttagattgctttcggtctcggctataaagtcctcggtagaatgtaaagtgataggcgttttattgttgtttgaatatgactcgtttctatcaattttgaatttaggggatgagctctttttttgtgatagggtgccagatgaaataattgccagcgaagggttgacgtttgttttgttgggcggaaaagggggggaggaaaacggggtcagaccctgagggactctagatgcttatcgctctggcagtgcagttgttttaggcaaaaatgcccaaggttttcctgtcgttcgagtcgaaggcgtaaccgggacaaatgtaaatattggagcggggataaacagtcagccaacaaatgtttttgtaatcaaaggaacgaaaagccctagtattgttcctacaagtcctaatcctaaattggtggaatagtatggatgtaattcttagaaatcaaataattgtcgcattgatgcaggcgctgttaggcgcaatttcccctaattttagagccgttataattgatttttcgcagggggtggatgtaaggtttttcttggttgaagatttaattgaagatgttgatgaaatcgatgatgtaattacagagcttgactcgctcgtaatggctattaaggcgctgccaataaagtactgtattgctgtgggagaagaaaggatcagcttttctggtgataacgtgattccgatttatattaggcgcgagtaattggtgcaaatggaatttcaattacgattgaatcaaagattgccgatcaaatgggtaaacggggtcgaacggaaagctctatacagtctgtaattgatcgggtaaacggggtcagacccagagcgggtaaacggggtcagacccagagggatcctcatggcgtctttagtatggacagaaaagagattttaggcgctgtcgatgaggcatggctcaagaaaggtagtcctgtagtcggggatccgggtgcatatgttgtcccgatgggccgagcgattgggacttcgggagaaacgagtattaaaattattgttcggcctgggaccagtcaggacattaccgcctatactgttaaatagagaagttttatatgttgtgtccaaggtgtgagcagggagatattgtcaaggctaaagttatagctgacgacagtagcttgttcgtatgtcaagagtgcgaggcctcatggtttttatacgaagatattggggtcagggaatttttcgactatggggcttatatggaaagtgtagggctgaaaccattatggagtgagttgataattattcctgagtagttgcaaaagccacagcggacttttaccgccggctcggcttcagcatatttggagaactcaaagattacccggtcgctggatacaatcggttttttatgcagaaaagatttggtctcgacaagcataacgctagtcgtactcagccttgaggcaatgacagcaaaaatctaagcaaggtgtgttacccgcgatcgatcgtcgccattcctttccagaagaacacgcaggacgtggtgcatgccttgacccgcagtaccctggaagaagcggtgcaacgccgattgttgtaatgcgtggtcaagtcagttcaacccgaacgtcgatcagccgtgaccggcgttcagcttcctatcaagtcgtaagaattgttcccggtaatatgtaggtcatttcgttttatgcttttccagtccttccaggcacctgctgtttcatccctgcactgttttatagttcacggagcaatccaccacggcagggagccgccccctcatgcatacccggaaaaaatccccccggcgccacaacccacaacccccgacccttcattccggccatcgcctgcgtctggtgctcaacacctacggcattccgcccacggcctttgccgaatggatgcgcgtcagcccgcagtgcctcaacaattggttttcacgcgggctgccggtggatcgcgtggagaaactggcgacaaccttgagcgtcagcaaagtgtggcttgagaccggcgagcgcggactatgacagtggcggggcggccaattcgccgcccctacttcaacggtcccaccacctgccggtatttttccactccctgtggcgtctgccgcaccaggctgatctccagtcccagcgggtcttcacggcgattgccactcaactgccgccaacctttgtccgcttcccatacgcgtacctgcaggtcactgacgccggtcagcaccaccacgccgtcctttgccgccggcagcgggtagcggtcccgcgcgggggcggcagcgcggtagagtgcgtcgcccttgagccaccaacgcacccgttgcaggccatcgccggccgctggggcgctgcggatcacgtccaggcgaaagcccttgctgtcggagctgcgcacggtcacggcggccagtccctctgtttgggtggcttgcgggggcgtcagttcgacactggcacgcaggcttatatcccgttgcatctggttcagcgcgcgcagcaacacttcggtctgttcggtgcttgcctgcaaatgctgatcggcgcgggtgacgctgtccagtccgcgccaggcgatcaggctgaccacggccatgagcatgatcgccaccatcacttcgatcagggtaaagccttgctgggatctgttcatggttgactcactacgcgcatcaagccggcggcgtcgcgttgcaggctgaggctgtgttggccgtcggacagcaccacacgcagcggtgggttgatccattcagcgttgagcaccagggtttgccggggttcgagacggatctgcatcggcgtgctttcccacaggcgtgggcgcagctggtcgtcgtgtttaaaggtgtcgaggccctggccgtcgtcccgctggcggttgaagcgaaagcccttggcatccgcgcgccaggtgatggggcggccgtcggcgtgggcttcggcctgggcgacttgcagcagttggctcaggcgctcggcatccttgcgcaacaggtgcagcgggtcgggcttgatggtgaggctgatggcggcgctggcgatgccgatgatcaccagcaccaccatcagctcgatcagggtgaagccttgctgtttcatcgcgggctacctggagaactggggagtgtgtgaaataaaagcgtgcgaattgacctgtaggctggtgcgacggacaaacaggaggtcctccccatgacatttgcccctcgtttcaccctggcccacggtgtgcaggctgtgggtgtgctggccgcgctggcgggtgtggcggtatggacgccgctgctactcaccagcgccgaatcccacaccccgcaagccacgccccaggcactggcggcgcgcagtgataacccggcgctgcaatggttttccaatgtgccgacggcgttgcaggtcaaggtcaccggcgtactggcgggagcgcggggcgcggtggcgatcctcagtctgaatgacggcccgccgcgcagctttctgctgggtgaacggctcagccccggtgtgcggctcacggccattgagggcgacggggtggagatcgagcgcggcggcgagaagctgcgcgtcaacctcgacaagttgccgccggggcctgcgttgccgctgctcactcggccatgacctgggtgtccagccgcgccaggggcggcgcttcgcggctggcgtcgagcacttgcaggttgacctggaacaggcggccgtcggcgttgatggtctgctcgcagcgcagtttcaggcggccttgatcgcaagtgacgatctgcttgccgctgcgcaggtggccttccaggcgcagttcggcgaggcgactctgcgccgccagcaacgcgatggatttgtctcgcagcaggccgttgctctgggtcatcaacccggccacgcgcacggcggcggccatggccacggcgatgatcgccagcgccaccagcacttcgatcagggtaaaaccttgctccttgcgacggccgtacatggcgctctcaaagccgggaaacaggcccgcagactagcgccggcagttgaccgattggcgactgaaactcccgaggattttcaatacgactgacatgtgttcttgcaacactgcgccacgaattgcactcaagccaaggaatgtcgagatggatatcgcgcgcctaacgtccccattgccaggccctcgcgggcagcgtggcttcaccctgatcgaaatcatggtggtggtggtcatcctcgggatcctcgccgcgatggtggtgcccaaggtcctggatcgcccggaccaggcgcgggccacggcggccaaacaggacatcggcgggttgatgcaggcgctgaagctctatcgcctcgatcacggcacgtacccgagcatgaaccagggcctcaaggtgttggtggagcgcccggcggacgccaagaacagcaactggcgcgcctacctggaccgcctgcccaacgacccatggggccacccttatcactacctcaacccgggcgccaatggtgaggtggacgtgttctccctcggcgccgacggccaaccggatggcgatggcgtgaatgccgatatcggctcctggcagctctaaggcccgccatgaaacggtattcgcccccagtggcgaagcagcgcggcatggcgattatcagcgccttgctgatcgcagcagtggtggcggtactggccggcgccatgctcacgcgccagaccgtatttacccgcagcctcgaagccgaacagctgcgcatccagggccaatggttgttgcagggcggcctggagcgcagccgacagctgctctgggacgcgcgccagaaggacgtgctgacccgtcttgatcaaccctgggcgcgggcccaagggggggccttcgaggggcggatcgaggacgaacagggcaagttcaacctgcgcaacctggtcagccgcgagcaggtggacactgagcaattgcagagcttcgaacggctgtgccgcctgatcggtgtcgacccgacggtgagtcggcgcatcagtcagcgggtgatcgcatcttatgaaccacccgccaaatacccgatgctgcgcagcctggatgagttgagcgggatcgaaggcctcgaccccctcgtgctgcagcgcatgcaggcctatatcagcgtgctgccgggcccgacctgggtcaacggcaacaccgccagcgccgaagtgctcagtgcagtggtgccccagctcagcctggcccaagcccatgggttggtggccgagcgtgacagcgggcagtggtttatcaaccggggtgacttcgtcaaccgcctgcacttgccgcaagtggcggtggattcggtgcaggtgggcattaccagcgagtggttccgcgtgcagggccaggcgcggcgcgagcagcggcgagtcacccttgacgccttgttgcaccgccctgaagaccgccagccacgggtgatctggtcgcgggtgggcgtatgaaacgcttgcgcattggcttgccgccgctggatcaattgagcgcgcagagccaggtccggttcgcctgggtggagcgaggcgcggtcattgaagagggcgacgccagcctggcgcagttgggccagtcgcgccaggcggcggactgcttcctgcatccacgggacagcctgctgaccagcctggagctgccgccattacccgcggcgaagaccgctgccgccgtggcttgtgccgcccaggcgttgatcctcggcgcggttgagcagatgcaggtcgcccacggcccgcgtgaaagcgatggccgcgtgcaggtggcctgggtacccaaagccgggctggagcggttggcgcagttgccactcaagctgcgcggcctgtacccggcgccctatgcactaccggtgggcgcggcagtgttggataacggctacctgctgacccgtgacagcctgcaacaaggcacggtgcacccgctggggttgcaggcgctggacctgccattggtggatgcggcgcagcgttggagcgggccggtgcccacatggggcttgcatggtcgcctcacacagccctcgaccggcggatggggcagggcactggcctgcgtggcgctggccatggccatctggaccctgggcctcaacctgtacgccgcccgccaggtggagcaaggccagcgactcaaggcgctgatgagccagcaggtgcgccaggcgtttccggcgttgccggtagtgctcaaccccttgcaacaggcccgccagcaattggccgcacgccagaccggcgcggccgccgacccgggccaacgcttcccgggcctgctgcaactggtgggaagcaacctgccgttcatggtcggcagtgtcgacagcctgacgtttgaacaggggcgcttgcgtgtcgagctgctcgccgacagccgtaacccgaccgtcgaaggtgaatggcaggcggcgttggcccaggccggtttcagcgccagccgcgatggccaggcctggaccattgctcccgcgcaagccgcagaaaaaaccggagccggcgatgaataaagtccagcgactgcgcagccaggcccgggtgttctggaacggcctggccctgcgcgaaaaacgcatgctcggcggcgccgggctggtcctggccagcctgttgacctggctggtgctggtgcagcccgcgttgaagaagatcgattactggcaagccgagacccccaagctgcgcgcccaggccgcagccttgcaggtgttgttgcaggacgtcgccgcgcccaggccgggtgacgaggccacattgcgccaggcgctggacagcgccgggctgcaagggcattaccagttgcaggcgctcgaacccggcggttggcgcctgaccttcgacaacgccccggccgatgcggtggtgggctggctgttgggcaatgcccgtttgttttccctggaggtgtccgaggcgcgtttgcagcgcgtgctcgataccgtcgacaactcggccggcactctgtccgggaccgttcgcatggatcaggcgcttggcgctaaggaagcttcatgaagtggtcagtcccccctttccgtatggttgcgccgctgctggtgctggccctgagtgcgtgcagcagccaggacgcgtccaagccgttgctggtggacagcgaactcggccaacccctggcggacacccgtcgcagtggcgagactgttctcgaccgccagagccaacccgcgcccaaagcgccggtacagcaccgcgtcaccaacagtgctcgcggccatgccccggcagctgtcaaggcacgcaacccgttgggtgaccagccggtgcaactcaattttgtcgacgccgacatccaggcggtggtacgtgcactgtcccgtgccaccggccagcagttcctggtggacccacgggtaaagggtaacctcaccctggtcagcgaaggccaggtaccggcgcatcaggcctacgacatgctgctggcggcgttgcgcatgcagggcttcagcgtggtcgatgtgggcggcgtcgcccaggtggtgcccgaggccgatgccaagctgctcggcgggccgatctacagtgccggcagcagcggcatgcagacccgcacgttccgtctgcaatacgaaaacgccgtcaacctgatcccggtgctgcgccccatcgtgtcgccgaacaacccgatcaacgcctaccccggcaacaacagcattgtgatcaccgactacgcggaaaacctggcgcgggtggcgcagatcatcaatggcatcgacacccccagcgccatcgacaccgacgtggtgatggtgcaaaacggcatcgccgtggacatcgccgccatggtctccgagttgctggacacccagggcgccgaccagacccaaaagatcaacgtgatcggcgacccgcgctccaactcgatcatcatccgctccggcagcccggagcggacggaactggcgcgcaacctgatctacaaactcgacaacgcccagagcaaccccagcaacatgcacgtggtgtacctgcgcaacgcccaggcgggcaagttggcccagtcattgcgtggcttgctcaccggcgagagcgattccggcgtgagcgacgatgcccgtggcaagctcagcgccatgggcggcaatggcaagaacaccgcccaaggcgcgagcaacgcgcaaaacagcagcggcacccccaccggcagcggcgtgcagtcgggttatggccaggccaccggttcgaccaccggcaccaacggcaccgccaaggatcaggacaccgcgttcagcgccggcggcgtgacgatccaggctgacgccaccaccaacaccctgctgatctccgcgccggacccgctgtaccgcaacctgcgcgaagtcatcgacatgctcgaccagcgtcgcgcccaagtggtgatcgaaagcctgatcgtggaggtcggcgaagacgacgccaccgaattcggcgtgcagtggcaggccggcaacctggggggcaagggtgggtttggtggcgtgaacctgggcggcagcggggtgaacagcgcgccgaccagcaagaccagcatcgatgtattgcccaagggcctcaacgtgggcctggtcaacggcaccgtggacattcccggcatcggcaaggtactcgaccttaaggtgttggcccgtgcgttgaagagcaagggcggcaccaacatattgtccacgcccaacctgctgaccctggacaacgaagcggcgagtatttttgtggggcagaccattccgtttgtcaccggcagttatgtgaccggcggcggaggcaccagcaacaacccgttccagacggtgcagcgtgaagaggtggggctcaagttgaacgtgcggccgcagatttccgagggcggtacggtgaaactggatatctaccaggaggtcagcacggtggatgcgcgggcgtcggtggaggcgggcacggtgaccaacaagcgggcgatcgataccagtattttgctggatgacgggcagatcatggtgctcggcgggttgctgcaggatgggtacagccagagcaatgatgcggtgccgtggttgtcggatattccggggttgggggcgttgtttcgcaatgagaagcgcagtgtgaacaagaccaacctgatggtgtttttgcggccgtacattattcgggacagtggggcggggcgcagtattacgttgaatcggtatgagtttatgcgcagggcgcaaggggggttgcagccggagcatagttgggcgatgccggatgtgcaggcgccgcagttgcctgcggtggagaaggcgattcctggtggccggccttgagcgttttgaccgtgtacatatctattccttcggtaacggcggcttatggttccgcccttacggcggctcacttttggaaaggcccaaaagtaagcaaaaggccttcgccccaccactcggcacctcgcctaggctcggtgtgccctcactccagcttgaatccgtgggccgccgccacgcgccatccatggcgcggggcggctaacccggcgtcctgccgggttacccacggattcaagcctgcgttcggccagcgtggttttacggggcgccgaagagcaagagcaagagcgactcgcttcgcatcgtggatacgttttttgttttgtgttgccgccctactgtggcgagcgggcttgccccgcgttgggctgcgaagcagccctaaaaccagtgtgagcgccgcgttcatcctggcttcccgcgtcatcgttaacgaccatcgcgggcaagcccggctcctacaggggaacacgttcgcttccacgactcggtcggctattcggccgccgcgctttgcttttgattttgatcttaggcgccccgtcaaacacgctggccggaattcggcagggatttggggggtaaaccggcagggatgccggtttagccgccccgcgccatggatggcgcgtggcggcggccccccaaatcactgtcggattacgggcacaccgagcctgggcgaggtgccgagtgttggggcaagagccctttgcttactttggggcttttccaaagtgagccgccgtaagggcggaaccctaagtagccgttaccgcagcaacggatatgtacacctacaaacagggccaaaaccatgagcctattgccctacgcctgggccaaatcccaacgcatcctcctgcgccccaccgaagcaggccacctgctgacggtgtgcccctcaacccccggctggtccatcagcgaagtccaccgccagttcggccaggcccagctcgaacaggtacgcgacgacgaactcgacggcctgctcaccgccgcctacgccgacaccggcagcgccgccgccgtggtgggcgccgccgaaaacgaggtcgacctcgaccgcctgatgcaagacatgcccgaagtcaccgacctgctcgacacccaggacggcgccccggtgatccgcatgatcaacgccttgctcacccaggccgcccgcgacgaagccagcgacatccatatcgaaccctacgaaacccattccgtggtgcgctaccgcgtcgacggcaccctgcgtgacgttgtttcgccgcgcaaggctctgcatggcgcactggtgtcgcgcatcaagatcatggcccaactcgatatcgccgaaaaacgcctgccccaggacgggcgcattgccctgcgcgtcgccgggcgtccgatcgacattcgcgtgtccacggtgcccaccggccatggcgaacgcgtcgtcatgcgcctgctggacaaacaagccgggcgcctgcagttggagaccctgggcatggagccgcagctgctcgcgcgcctggatacgctgatccgccagccccacggcatcgtgctggtcaccgggcctaccggcagtggcaagaccaccagcctgtacgccgccctggcgcggctggatgcgagtaccagcaacatccttaccgtggaagacccggtggagtacgacctgccgggcatcagccagatccaggtcaacgccaagatcgacatgaccttcggcctggccctgcgcgcgatcctgcgccaggacccggacatcatcatgatcggcgaaatccgtgacctggagaccgcacaaatcgccgtgcaggcttcgctcaccggtcacttggtgctggcgaccttgcacaccaacgacgcggtgtcggcggtcaaccgcctgatcgatatgggggtggagccgttcttgctggcgtcgtccctgctgggggtgttggcccagcgcctggtaaggcgcctgtgcccgcactgcaagcaggaagaccccgctgcgcccggcacctggcgcccggtgggctgcgcgcagtgcaaccaggtcggctacagcgggcgtaccggtatccatgagttgttctgtgtcgacgacgcggtgcgcagcctgatccacgagggtgccaacgagcaggacctgcgcctggccgcgcgccgcgccgggatgttgagcatgcgtgaagacggtgaacgctgggtgcgcagcgctgccaccgcccccgaagaaatcctgcgtgtgacacgggacgcctgatgaatcgctatcgctacgaggccgccgatgccagcggcaaagtcgaggccgggcatgtggaggctgacagccagagcgcagcctttgccaacctgcgcagtcgcggtttgaccgcgttgttggtgcagatcgaaggcaatcagctggccgcgacgggcagcagcctgttcagcgccaagctgtcggacaacgacctggcctgggccacgcggcaactggcgagcctgctgggcgcaagcctgccgttggaagccgcgctgagtgccacggtggagcaggccgagaaaaagcatatcgcccagaccctggcagccgtgcgcgccgatgtgcgtggcggcatgcgcctggcggatgcgttggcggcgcgacctcgggattttccgtcgatctaccgcgcgctgatcgcggcgggggaggagtccggtgacctggcccaggtgatggagcgtttggctgactacatcgaggaacgcaacaacctgcgtggcaagatcctcaccgcgtttatctaccccggcgtggtggggctggtgtccatcggcattgtgattttcttgctgagctatgtggtgccccaggtggtcagcgcgttctcccaggcacgccaggacctgccggggctgaccctggcgatgctcaacgcgagtgacttcatccgcgcctggggctggctgtgttttgccgggatcgtcggcgggttctggagctggcgcctgtacctgcgcaatcccgtggcgcgcctgaattggcacagccgtgtgctgcgcctgccattgatcgggcgttttgtactggggttgaacacggcacgattcgcctcgaccctggcgatcctcggcggtgccggcgtgccgttgctgcgtgccctggaggccgcgcggcaaaccttgtccaacgaccggctcgaccaatgcgtcagcgatgccaccgccaaggtgcgcgaaggcgtcaacctggccccggcgctggcggtggaaaaggtcttcccgccggtgctgatccacctgatcgccagcggcgagaaaaccggctcgctgccaccgatgctggagcgggcggcgcagacgctgtcgcgggatatcgaacggcgtgccatgggcatgaccgccttgctggagccgctgatgatcgtggtgatgggggccgtggtgctggtgatcgtcatggcggtgctgttgccgatcatcgagatcaaccaactcgtcacctgactgtgggagggggcttgcccccgattgcgcagagtcagtcactacatctttggctgacccactgcaatcgggggcaagccccctcccacatttgaactgtgtttattcaatgggtttttgtgcgcacctgatgctgccccgtccaacctcgggttcctcattccgtcacatcccgacagcccatgccgcctccagccaaacgcgctgaaacctcgctgtcacctgcgtccaaagcgctcggaatcatgaccaaaacacccgagaatctttttaaaaatcaaggtgttcctcccgaggttttttcctacaaacgtcatcggaaactgcgaatttctctcccatggttttcacccctggccacccccgcaagacggcttgggaccgaagccatggcgtcatgcaagagccatctaccccaaacgtacaaacacgacgaaaggagattcttcatgtttaagcgcaacgttctcgcggtatccatgaccctcgctgcactgtgctcggcccaggctgcaatggctgacatcaacggcggcggcgccactctgccagaaccgctgtacaagactgctggcgtactgactgccggttttgccgagtacatcggtgtcggcagcggcaatggcaagtcagctttcctgaacaacgactacaccaagttcgtcgccggtgtgaccaacaagaacgtgcattgggccggcagcgattccaaactttccgccgctgaactgctcgcttatcaaaacaccaagcaagccggttggggcaagctgatccaggtaccttcggtggccacttcggttgccattcctttcaacaagaccggtgccggtaacgtcaacctgaccgttgaccaactctgcggcgtctactcgggtcgtctgactacctgggaccagatcaccccaggccttaccggtaccatccaagtggcttaccgtaaaggcgccagcggcacgaccgagctgttcacccgtttcctcaatgccaagtgcaacccgacattggaaaacggtactttcgccgtgacccagactttcgaaagcagcttctcccgtggcctgccagcgggtgcaatcaaccctctgcaagaagtcaacccagccagcactaccacgcctaaagaaaccttcaaggacaccagtgaaggtgtgatgggcttgctgaacaacgctcagaaccgcatcacctacatgagcccggactgggctgcaaccagcgtcgccggcctgggtgacgcaaccaaagtcgccacgatcggtggtgtttcgcctgcacctgccaacgtttcggccgcgatcaacgcgatccagccgccagccgtcgccagccgtggcgaccagaacgtctgggtgcctgtgttcgcagcgactaccaaccccaacgacgccagcgtcgtgcaatacccaagcaccggctacccaatcctgggcttcactaacctgatcttcagccagtgctatgccaacgctgatcaaaccacccaagtgcgtgcgttcttctccaagcactacggcgctttgtccaacaacgacacggcgatcaccaacaaccgcttcgtaccgctgccagccagctggaaaaccgctgtgcgtgacaccttcgtcaccgcgtccaacggtttgagcatcggcaacacctctgtttgcaaccaaatcggtcgtccgctgtaacccacgtttcaacgacccgcgacaccgatcagcaacggcctgtgccgttgctgatttttttgcgttaacagccccatgtgaactttccatgacagaagttcagtcccgtgcctcgacaaccgcctactcctcatacgtgagcctgtcttgctgcctgtgcgcagacaaatgtgtgatgacaaagaaggaagactccagatggtccgctgcaaatcaccggttaacctgaaagcccaagagactatcctgcgcctgaagccactggcccacgccatcgccttgttgatggtggcaggcaatgcccaggcggccacggcgttcagttccagctggtttgccgacaaaggcgcgacccaggcggcgacggcggcacggatcagcgcaggtcaggtaccggggattccgtcgctgaacgaacaggcccgggtcaaccagcagttggcgcgttccatcagcacactgaacaccagtgtcgcggccattgctgcgcaacaggcggcgcaggcagctgggcgccaagcggcgttgggccaggtctcgaccattcccgatggcttgggcaagggcggcctgcaggtcgataacagcctgacccagggctggatcaacgccaagaacccgacccagagccagtccggcggcaagaccaccgtgaccatcgagcaaaccgccgacaaggcgatcctcaactgggagaccttcaacgtcgggcgcaacaccaccgtggatttccagcaacagtccaattgggccgtgctcaaccgtgtcaatgatcccgattcgcgccccagcgagatccaggggcagatccagggcgccggcaccgtgatgatcgtgaaccgcaacggtgtggtgttcagcggtaccagccaggtcaatgtgcgcaacctggtggccgcggcggcgaacatcaccgatgaacagttcacccagcgcggtatctatgtggatgccaatggcacccaggcgaccttcaccgatgcggcaggcaaggtccaggtgcagcgcggtgcgttgatccagacccataaggctgcgacctccactgacgccggtggttatgcgttgctgctcggttcggaggtggaaaacgccggtaccatcatcaccgccaaaggccagaccacgctggcagccggtgacagcttttacatccgcaagggcgtcgggactgccggcaatgatcggtccaccacccgtggcaatgaagtcgccaccagcctcaaggccggcagcacggccggcaaggtcaccaacgaggggctgatcatggcctctacgggtgacatcacccttacgggtcatcaggtgcaacagaacggcgtagccctggccagtacctcggtggacacgcgcggcacgatccatctgctgaactcggcaaccgatcaaaccggcagcgtgaccctgggcgagggcagcaccaccgcgatcttgctggacgccagcggcagcacagccctcaacagccagaagggggccggcctggaaaaattcgatggcctggccgccaacctgatcacgggccagttcaacaacctcagcgcggtggccgaccgtaccgaccagtcgcgtatcgaaatcgtcagcggcggcaccgtggacttccagaaaggctcgatcaccctggccaccggcggccaagtcgcggttagcgccaccggtcgcagcctggtgcgcgatggcgcgatgatcgacgtgtccggtgccattggcgtcaaggtgtcgatggacgccaataacatcaagatcaacgtgcagggcaacgagcagcgcgatgcaccggtcaaccgcgatggcgggcaactgatcaacaatgatgtctgggtcgacttgcgtgaactggtcttcgtaccggcaggcaccaatggttatgcgacagaccgctggtacaccgcgggtggcttgcttgaagtcggcggttacctcggcacacagggtcattcggtgggcgaatggatggcccagggcggcaccgtgacctttaccggcaaggaggcggtgacccaacagggtgcgcagatcaacctgtccggcggcaccgtggatgtgcaggccgggtatgtgcgtcagacctggctcaaggggccagatgggcggttgtacgaactgtcgacggcaccaggcgacattctctattcggggctctacaaaggttatgaagacaccagcacgcgctggggccagaccgactactactacaacccgatgatcgccacgcaacgccgttacgagaacggttacaccgtgggccgcgatgccggcaagctggtcatcggtacgagcagcgcggtgctcgaaggccaggtgatcagcgatgtgttccagggcgatcgccagacccaggcgccgaatatcaacctggacggttaccagcagtcccagaaggccaaagcccagcgtgcacagttgatcattggccaatacatcccgatctacaacaaggccaccggcaccctgcgctacgccctcagtggtaccaccgaccaggtgctgatcgacagcaacacgcagaaaatcgcagacggccttgacctcactgccgcattgccggcggaccgccaaggcaagttggtactcgacagtgaccagctcaatggcttccagctgggggcgatcaaggtcggcgccaagcagcagatcaccgtcaacggcgcgctgaaagtggccgatggcggcgacatcaccctgttcgggccgggtgttgccatcaacgccaacctcacggcccatggcggcagtatcaacgctggcaacattctcacccaggttgaccgcgacaaaggcaacgcggtgggggacgtgatcctggcgggcagcgggcggcttgacgtggcctccggggtcaagctggaggccggcggacgctggaataacctcgcgctggaccccgccaaccgtgaaggtgtggcgtatatcaatggcggcaaagtgtcgctgcgcagcaccaacgtggtcaacctcgctgccggtagcctggtggatgtgtcctcgggcgccacggttggcgaagacggcaagctcagtggtggcaagggcggcgacgtgaagctcggcggcctcggcagcctcggcctgggcggcgaggtgcgtggctatggcgtcaacggcggtggcaccctggcgttgcaggcgcacaaggtgttgatcggcacaggtgcggtagatgccgacaccctgcagttgggcggcgactttttcaacaaggggttctcggcgtatgacatcaccggtaatgaagggctgatcgtcgcgaacggtacccaggtcgatgtgaacatgccggtctaccatgtgggcgagcaggccaccggcgcgccgaccggcagcgatgcggcaagtgcgctcgaacgctggaccccgccgctgtaccaggaggacgccaccaagggcgtgctgacccagcgccgtggcgcgagcttgagcctgagcgccggccatacgctgtcgacggccgcgcagatggcgacgacggcactgaccgtgggccagggggcggtgatcaacgtcgatcccggccaggcgatcaacctgcagagcatcggccagctcaccctggacggcacgctcaacgcgtggggcggcagcgtcagcctcaagggcttgaccacggcggactcggaaaaagtcgaggcgatcggccatgggcgttcgatctggatcggcgaacacgcgctgatcgatgtggctggccgtgccgtgacggctgtggacaatcgcggcggcatttatggccaggtgcgcaacggcgggacgatcacggtagggggcgacattgaccccaccaccggggttgccaagaccagcaacctgttcgtggtcgtgcgtgagggcgcgcgcctggatgcttccggcacccaggcgttgctggatgtgccaggccaggggcgcacgacggtggcaagcaacggtggcaccctcgcttttgcgtccagcaacggcctgtacctggatggcagcttcaaggctaatgcaggtggtgccggtgcggccggcgggcgtctggcattggcgctggaggcaccgtattacctgcgcagcctggccaccaaccgagtgttaccggtgcgcgagctggttctgagccagcagtaccaggcgcaagcgctgccaggcagtgccgaagcggcggccgatgcgttgacctacggtcatgcccggcttggcgtcgaccaggtgacggcgggcggctttgatagcctggccctgttggtcaatggcgcgctgaacatggcgggtgacgtttcgctggccatgggccagagcctggaggtgtactcacaaggcatagggttggcgaagaacgcgcccgtgaccgcccaggttcatcttgcggcgccccatgtggtactcagcggcatgctcgcgccagatcggaccggcatggagagttacatcacgccgtacctgggtgacccggtatcgactgttccggggcagggccggttcacggttgacagcgatctgctggatattcgcgacaaagtcacgtttgccctcaaccagggctttgaccgggtcaatctcaacagccgtggcgatctgcgttttctcgccggacgcgatggcggcgtcacccccaatggcttcagtacggtcttgcagtctggcggtgacctgaccttgcgggcctcacgtatctaccccggcagcgaaatcgccgcgcaagtgctggtgggcctcaccggcagcacggccaccggtttattgttcgatcccgcgcgtaccctcaccctggaaaaaaacggcgacgccagcgtggtcgctccgtattcgattttcggtcgcctgcaattgggcgcagcgaccatcaagcagggcggcgtgttgcaggccccgttgggtctgatcgaaatcggcaaccagggcagcacccgtgtcgaactgctgcccggcagcctgacgtccgtgagcggcaaggggttggtgctgccgtacggcggaaccgtggacggccaggtctaccgttacaacggtaagaccgtgaacttcatcggccagggcggcgtgcgcaatggcaacggcgacctgacggtcggcgtgatcctgggcggcaagtcggtggcggtactgcccgacgctaccctggatttgtccggcggcggtgagctgctgggggccgggtttatttccggccgggggggctctacggatgcgcgctataacccactggtgcagttcggcgccaacggcgggtttgtgctgccgggattgagcaccaacccggtgtacgccatcgtgccgggcgcgcagccagggtatgcgcccgtggccgccgagggcggtgcggtagcacctttggtcggccagcagatcaccatcggcgcgggtgtgccgggactgccggccggcacctataccttgatgccgtccacctatgccctgatgcccggcgccttccgggtcgagatcaatggcctggcggggaccggcagcggtgccggtgtcattgcgatgcgcaacggctcatggtccaccgccgggcagctgtcgatcatcaacaccgggatccgtaacagccaggtcagccaagtgatcatcacgtcggccgataccttgcgccgttattcccagtacaacgaaatgagttatgcccaattcgccgtcggggatgcggccaagctcggtgtgccacgggcgctgatgccggtggacgccaaaacgctcaagctggccctggatgccggcggcggcagtgacaccttttcgttcaagggcattggccggttcgaagcagccccgggtggctatggcggcacggttgcggtcaccagcagggtgcccaacggcgcaatacagattgtcgacgccaacagcccgttgaccgaagcgttcagcggtgtgacggtggatgcgcaaagtctcaacgccatgggtgccaagcgtttgctggtgggcggtttgtcgatggtgctgtatgggcagagtggcaacaacgtcggatttgccaccagcatggccgggaccatcaccctgcgttcaggcgcgaatctggtggcgccggaagtgatgatggtttcgcgcaatggcgatatcgtggttgagcaaggcgcctccatcaataccctcggccagggcgcggcgtcttatgattcacgcgatggctttgtctacagcagcgcgcccaacatgctcgtggtctccaacggcttgatcaatgtgctgccgtatccggaaacggccggcaggggcggcggcatccggatcggtgcttgcgtcacgagcccttgcagtgggcagactgcgttgtattccgaaggcagtatcgtgatctcgaccacccaggccctggagctgaatgaccaggtgcgctacggcactcgccacctcgcactggccttgagcaacatcaacgtcggcagcgtcgaggccctggccgatgccgccgcacgcaacgtgttgccggcgggcttgaccctcaaccagcaggtgatcaaccgcttgctgcgcggtgatacccagtctggcgcaccggccctggaaaccctgcaattgtcggcggcccaggcattcaacttctacggcaccacgacgctggacacgtatgatgcacagaccggcaagtcgctgctgaacaacttgttgctgtccacgccggcgatctacggcgccggcaatgccaatgacgtggcgacaatccacaccgccaacctgatctggcagggcgccgaggcgcctcccggcgccgtggttgccggcggtgccggcaccggcagtgggcgcctggatatcaatgccgagcgcatcgagttcggctacggcgcctttgcccagcccagcaccaccaagactttcgaccgcctggccctgggctttgccaacgtcaacctgaatgccagtgaccgcattacggccaactacaagggcagcttgtcggtataccggaacctgaccggctacgacccggtcaagggcttccagtacagcggcggcaacctcaatatcctcacaccactgatgaccggtgaagccggctcggtcaaccgtatcactgccggcggcgccattgatgtcgccgccgccgccggtgcgcgggggaccgccaatggcatgggcgccgagctgtccctgcaaggcgacagtgtgcgagtagccagcgccgtggtattgcccagcggcaaggtcaagctcggcgcacggggcgacgtggtactgacggacggcgcattgatcgacgtcgccggacgctcggtggtcttcaacgacctcactcaatacggctgggggggcgaggtattgctcgacagccgcagcggcaatgttttgcaggcggcgggttcgaccatcgacctgtcggccaaacataaccaggccggcaaactgcgtgcggttgccgttgatgcggcaggcggtattgtcgacctgcaaggccgcgttctcggcagcagcaccggctactaccacgctggcggcaccttgatgccttatacggcgggcagcgtggaaatccaggcacaacgcctgggcggcaatggttcgctggaccaacagtttgccgacctcaaccagcgtctcaatgccggccaggtgttcggtgcgcgcagcttccagctcaaacagggcgacctgaccatcggcgaggggctcaaggcgggcatcatcaacgtctcggtcgacaacggcagcctgcgggtcactggcctggtggacgccagcggcgaacgcgtcggcagtatcagcctggccggcaagaacggcctgaccctcgcgggcagtgcggtgctggatgcccacggcagcaagttgcgggtggacagctacggcaagatcatcgattcgccgaaccgggccatggtggcgctgagttccggtaacggcgtgttgaccctggccgaaggcgcgcgcatcgacctgcgccacggcaccgcagccattcgcggcaacgatgggcgcaatcgcggcaccctggagctcaacgcaccgcgcctggccggggccggcggcgtcatcaacgacatcgccatcgacgcccatggccgcgtggacattcaaggtgctcgcgcgatcaccctcaatggcatggccacctatgacgatgcgcccgagaaaaccgatccaaccgccagcggcaaaccgtaccagcaaatcacccaggattatctgaacgacaaacatagactgagcacggactttatcaacgcggcgctgctcaacaacaacctgctgcaaaacaagctcgccggcttgaataacgacacctacggcgacaccttccacctgcgtcccggtgtggaaatcgtcagcaagacgccagacggcgacctggtggtgcagggtgacctggacctgtccggctatcgctacgccagcctcaagtcgccgacccatgaaaagaccgaggccggcagcctgaccttgcgcgcggggggcgacctgagcatctacggcagtatcaacgatggctttgcgctgccgccggagactgtagacgacaagggctgggtgctgttgccgggggttgacttcaccggtggcgatatcgtggtgccggggcagggtgtgagcctggcaatcggcacggccttcccggcgggtgtggtgctcaactacgacctgccgatcgccgacatcggcgtgagcgcaggcacccgtttgccggtgcgcgccaccctcagacaggacctggtgctgccagccggcaccgtgctggcggcggcggtattcgacagcacgggcaacgtgctgtttgccgctggtaccttgctgagccaggcgcagaccctggtcagcgggtcgcaactggacgccggcagtctgttgacccagaacactttgttgaaggcgatgacctggcccaagggcgtgccgctgccgcagaatttccaggcgcctggccccacccagaacgtggtgaccctggcccgcgatttgttgttgcccaagggtgcactgattccttccggtaccaacgtcaagttgctcaacgatgcgacatcggtcgagctgcgtcccgaagtggcggggcgccagggccagaactgggccattgcaccgatgctggccgagggttcgcagtcgtggtcgctgcggctggtggcgggcgccgacaccgaggcggccgacagtcgtctgttgcaacctcatcccacaaccggtgacctgcgcctggcggacagtcactacggcatgttcgccaaggagctgccgtcccaggtcgtgcaaacgtggtctgcggccggggtcgagctgctggcgagcctgggcaaggacgtcaaggtgggtgacccgatcgaacagtcgctgctcgatgagctgggcggcggtccgatcgccgatttctgtgcgggttcgccggactactgcgcggtgaagccatcgtttgtctggaccgcccaggcggtggcggacctggccgagtacggcctgacggaaggcgcgccgattaccgatgcattcctggcgcaatttaacaccaccaccacgcagttctgtgcggataaccccgcttactgcctttcccaatcggtcaaggagttcggtgcaagccccgccgcgacgcgcttcagtgtgatccgcacaggcaccggcgatctggagttgttgagcgccggcaacctgagcatggactcgctgtacggggtgtacaccgccggcacctcgtctgccgccaccttcgcgggcgacccgtacaaccagcccaagtccaacggccggggcaagaccgtgctgaacgacgagggcagctatttcgagcaattcgtcaacgccagccccaccagcctgtaccgcgcctggtatccgcaagcgggcggcaacctgaacgtgaaggtgggtggcaatctgacaggcaatatcctcaacgtcacggcttccgcgcctggtcggccaaaccctctggataccggctacgattcggccagtgtcggcaactggttgtggcgccagggcagcggcactgtcgatacgggcggggcagcgcagcccacggcctggtggatcaatttcggcagttacaccgcgaccgccacagctgaccaactggtgggctttaccggtttcggcaccttgggcggtggcgacgtggatgtacgggtaggcggtgacgccgggatgcttcgctcgctggccggcaatgccatggcggccaatgccagcccacgcagccagggcttggtgctggcggtcggcagcaccgggcgggtggccagtgatggcagcctgcaactcaccggtggtggtgacctgcgggtgcatatcggcggggcgcttaaccctgaaagccagcttgatagcagcagcttgaacggcacactggtggacctgcgcggtaacgctcaactgctgggcggcgcctcgggccggatagagttgcagtacggcattgccaataccgaccacagcccgggtgaagtgcgggcgttcgacgcgttgcaggccacccgggggctgacgcgcggcggcatggtgctggtgccgggtgatgcgacgttcagcctggcgaccctgggcgacctggcgttgcagagcgtgatcgaccccggccgggtattgctgcccaacagttcgtcatttgtccgggggcaggaacacggcccaggcaccagttggttctcgctgtggaccgggcaaacggcgatcgacctgttttccgccggcggcaacctgtcgcccaattccacggggctggcctctgacctggcggtggtctatccgtcgatcttgcgtgcgacggccgccagcggcagcctgtactacggcaaggcgggtagctcttccttgaccgacaacgattacaaattcccgttgttgcttgctccgggcgtgaacggccagttgcagttgctggcccatgattcgatctatgccggcggcacgttcgtgagccaatcggcagctgatccagcgatcatggccacgccttggcaaccggcatttgtcggcaggctcggtaccgacatcaagcctgtcgccagcaacctctcgccaaacggcagttccgacaacgtcccgcttctaccactgtttgtgtttggttccgccagcgcgtcgaccagcggttatgctccggcctccgctgcgcgtttctacgcattgaccggtgacctggtgggtgtcagcagtgggcggatcatctcgtttggggtcaaccccggcgatctgcatcaagggcagacctggtacgagggcggtggtgccgtgtggatgatggcaggccgggatattgtcagcagtggcagcctgtttgaccgaatcagcggttaccagagagaaacgtccatgggcaacctgtttgtccacaacagccccaccgatatctccatcgtgtctgccgggcgcgacatcctctacagcaacttccaggtcgccgggccgggcgcgttggagctgacggccgggcgtaatatccagatggacgacaaagtcagcgtcaccagccttggccccgtagcctcgggcgataaccgccccggcgcgagcattgtcatgcaagccggcgtcggccccgacggcccggattaccgtcgcttcgtcgaggcctacctggaccctgtgaacctggcgcagccgggtgagtcgatccagagcggcaaggtcgccaagacctacgagaacgaactggtcggctggctcgccgagcgctttggttttgtcggcggcaccgagcaggcgcgcacttactacgcggcgctccccgccgagcaacaacgggtgttcgcccgcgacgtttacttcgccgagctcaaggccgctggccgtgagtacaacagcgctggcagcgtgcgccagggcagctacctgcgtggccgcgtagcgattgcggcgctgttcccggacaaggacgtggccggcaacccgatcacctacaaaggcgacatcacgatgttcggtggcgcgggcgtacacaccaacttcggcggttcgatccagatgctcaccccgggcggcagccagaccttcggtatcgaaggcgcggcgccaccgtcgacggcgggggtgatcacccagggcgcgggggatatccagctgtattccctgggcagcatcctgctgggtcagagccgcatcatgaccaccttcggcggctcgatcatgggctggaccagcgaaggcgacatcaacgccgggcgcggttccaagaccaccgtggtgtacacgccgcccaagcgtgtctatgacaattggggcaacgtcggcctgtcgccgtcggtgccgagtaccggtgcggggatcgccacgctcaacccaatcccggaagtgccggcgggggacatcgacctgatcgcgccgctgggcaccatcgacgccggcgaggcggggatccgtgtgtccggcaacgtcaacattgccgccttgcgcgtggtgaacgcggcgaacatccagacccagggcaagtcgtccggggtgccggtggccgccagcgtcaacaccggcgccatgagctcggccagcgcggccggggcggcggcgtcccaggcggcggaagacgcggcgcgcagccagcaggcggccgcgaagcagggcaggccgtcgatcatgactgtggaagtgttgagcctgggcaacgaaccgttgccgcaagagcctgcgccggcgcagaaaacctccggctacaaccccaacagcccggtgcaggtgctgggcgcagggccgctgagcgaacaggcgcgagcgcggctgacggatgaggagcgcaagcagatcagtttgtaaggctgtggaaaggacctctcgatgtaccgttcggggcgatcaatgatcgcccctttttttgcgccggttacgggttgtccttgagggtcttgaacgactcgatgcgtttgatcagccgcgtgttcttcgccgagtcggcattgctgaacaggaaggagaagtccgacgccagcccggattttccggcaatcgccgcgtactggtggcagtcgttgcagttgtcggtctgcacgtaggtttccatggtggtgttggcgacgacgacactctggtcgctgacaaacggcccataggacagcggtacctgcacgttcggccctgggcctgggtcgttgggcgcattgggcgtcttggaccacagcacattcaccagtttgtagtactggaataccgactggccctgggtctgctgggcgaaggtctgctgcactgccgtgttcagcgcctgcatgtcctggggcgtggcgttggcgcgggtggcctgcaccggctggtcgaggggcgtgcagttgggcggcgtgtgcgtggcgtcgcactgcacgcggggcacattcggcgtgcaggcatcaccggtgcatgccgggttgttgaagctgtagccctcgggcggcgcggcaccaccgtcaggcacgttgtcgacctgctcgaaggtggtccagatgaaattcggctgggtctgggtcttgttgatgatatgcaggcccaccaggccaatcacttcctgggtgcattgcagcgtgtccgggcgttgcagccaggccacggtggtcaggtagcgcccgtacagggcgggcttgttggtgagcacgcgccaggcggctttcagttccagggcgccgagttcttcctgcggcagcgccttggccggcagttcacgcaccagcttgccggccggcagtgacaggccggcggggtgccgtttgtcgctgttctgcgccacgatcagctggttggccgcatcgtacaaaccgttgtcgacgatgtagtcgaactcggccttgcccaccttgcgctcgaaaaacaccaggttgccggactggtccgttagccaaccgccggaggcttccatgatcgaatcgggcagggtcacctgggtgccgctggacaggtggaagcggtgcttgcggttgatcgcgctttccgaggtggcggtgatgaatttacgcgcgcccgtggcaaacgccttgaggttgccggtggcggtgcagttggacggcaccagggtttccacgccccagccggacggcttggccgcgccgggcaggaagatctcgctggcatccttgtagcttgcccacactggtgccttgctcatcggttggccgggcgttgatggcacgccgaactgggctgcgctgctttgcgtatccggctcaccggccaggctcgggttggccggccagccggggttgaccggccagttcatggcgatgaacaactgccagccgaagcagttgagaaaggcctgctcggtgccgaaattgttcaccggcaggaagccgccgctggtggggtcgaacaccaactggctgacgcagctctgggcatccgaggcggcactggccggtacgggggccagccacgggagaagggcgcaggtgattgtgcagacaatacgcaagcgtgcccggcgcagcgggcgaagccatccgttcatggtcgcattccttgctcaagactttaggggcggccacccacgccaggcatgggcggccgggtggaactcaggcgctgggcaccagggccaggccgctttcccatgggtgctcggtggcactcgggttggccgcttcgttggggttgagcgcacgcacgctgaccagccccggcgccgcgttgctgctgacggtaatggtcatgatgtagccctgggtgccgccgccgtcggtctgcccgggaatcgccgaggcatccggcaggaactgcgtgacctgggccgtgacgcccgggttggagaactgcacccgtgcatccgccgccgtggtgttcgggtcggcgccttgtaccaccaatacgaactggcctgagctgccgggcgcaaagctggccggcaagtcgctgggggattgcccgtagaacaggtcaatcggcagcaactgcacgggccagggttgcgcatcggtggtgttggccgccacgcaggcacactccttgggctgggccgtgagcggcgcaggggtcacgctgagggccacattcagttcgttggcgatcacccacacgtagtcgatcggcgtgccgttgatggtgatgtcattgatcgagaaccccgcgctggtcggcacctcgaagaccgcctggagaatctggtcggagttgttcgggccggtgccggcggtgccacgggtaacgcgccagtagctgctgacatcctggccttgcgggcctttccaggtgctgaaggacttgggttgctgcaggtacaggccgatggggttggtcaacgagatcaggttgttgaccgccgcctggttggcggagaacccgatatgcgggtcggagttgcggtagttctgcccgtactgcgcgcagcagatcaggctctgctggttctggctgctgctgagcggccgcaggatggtggcggccgccgccaggtagatctcggcactcagggtgttggggccggaggtcaggtgcatcgcgccacccgacacgcccggtatgcgcacggtgccgctgttccatttgttcacggtgtcgtaggcgggctggccggtggtggggtcgagcaccggttcgccggccttgccggtcgggccgtcggcggtgtagcgcaggtacaggtcttcgagtttcacctgcgggtcgacatacgcctggtacagacccagcacggcacccgggtcgatgttccacatggtcaggaagtacgccgggttctcgctggtgaacatgatgctgcgcatgctgccgtcggggtcgcgggtgatcgaccactcgcagtattcatccagccagccccgtgggccagagggcgaaaagtcggcgtaggggccgttccagttgatggatttgcacagcacgctggggatctgcagttgggtcgcctgcgggtccgggtacagcgaatacagggtgttattgagggtgatctggccgtggtcggtcagttgcatcacctggtccagggtcatggccttgccgcccagttgcgggaccacggcggcgccgttgttgtagaagaacgtccagaggcgattgggaaagggctgccaggtgatggtcttcggcgtcagcgtgccgtagccgctctccagcgggttgtaatagcccgagcgcggtgcatcgttgaggttggaccaggggttgccgatgatcgacatctgggtccagccggtgacgttgttgttccagtcggtctcgaaggtcggcaactggtcctccaggccgagcttgttgtagtccttgggcgcttgttcggcaggggaggtgaattgggtgaagggtgtgctcatgtcggttctccagcatgggtgttggtggagcagcaaccggcgtccggagcggggccggcagaggtttggcgtgggtcgtcccacaccagttcggcgataaagccaggcagcggcgcgtatgcatcggccgtcaacacctggccactatcggagtgggtcacgaccagcgataactgcgctgcgtcggtcggtttgagcttcagtacctgggcattgcgcgcagcattcagcgcccgcgacacgccctgggtgatgcagcggcccttgtcgtctaccaaccccatgccgatgcggctgaaacgcccgacgtaatgcgggttgtcggcgcgggcgtgctgcgccgtggcgtcgggttggttgaggaagacgtcgatcaggtaggtgtcatgggtgcagcgcacatggtcgaacaccacccagggacctgtgcctgcggcctgcggttgatggcagcacgcagcctgggccgcgccgaactgtggggcgacgggcgtgccgtagtcgtagccgatgtgccggctgtcctgggccatgtcgccgagggtggtgtagcgccaggcatcggcgctggtgaaggtcacgtcattggcctgctgcccggcgaacggctgcaacaggcattgggtggtgtactgcgccgccgggttgacacggatccagacctccagcatgcgatcgatattggcgtgataggaacagaacaccgggtcgaacgcggtgtaggcgttgtcggccatgtcgccgccgatccagccgtgatagttgtcgtggggctgctcgtagagcccgtcgaaattcaatgcgcggttggggtacagattgttcggttgcggtgggtcgaaactggtgatgttggcccacggatagcctggtacaccctggggctggctgaaggtggtgaacgccagcgcatcgaccacctgctgctggaagatccggctcatgccatacaactgggtgcgctcgaatcggaaggcctcgccctgggtgtagaacagcgggttgcgctgcacataccggcagtcgacgccctcgaccggcgcggtggcgcagaccttggagcaaccatccttggccgccgcataccgcaacgggttatgccgcacctcaccggtgtgcgggtgcacgtaggtttcatcgaggaacgcctgaggcaagccggcctgggggctgccgtcgatactggcgtctgcggccatccagtcccagtagggaatcgcgcagtcgatcaacgcttccaggtacagcaggtaagcgcggtgccacagggcgaacgcttcctggtagtgcaggcaccagttggtatggatgtaggcatagcgctgccagggtgagccgctgtcggcgtcgccaatgtgcatcacgtcatccagcttggcgcggtacaggttcagtgcttcggggctcagggcgcggatgtcctggcgcacacgcttgaccgggtgtggcagcgccggtggcgggatgcgctcggccgggtcgaacggcgaaatgctgtccagccgccagccctggttgacccacaggcggaaggtttccagggcatcgagcggccagaactgctgctgatcggtggtcagcggcatgttgcgcgaggccaggtgctggtagatggtttgcgaccaggtcttgaccgaggccgggtcttccaggaacacatcgtaggcgttcatgcagccgacccaggtggcggcgacggcggcgcgctggggggcgggtatccagtagggggcgctgaacagcgccttgatatcaccggtccatgtcggtttcgcgactatcataagatccctctcatgccgccttcaggccaggtgttggccgggctgctaagctggatcgatgttaactagccactgcgcaggatttgtgcaaattggcccgtctttgcgacgtattcattgcattttttcaaggacgatttggaaccgatgacagacgccatggatttgaagatcctgggcaagttgcagaaggattgcgaccagagcctggagttgttgagcgacagcgtggggctgtcttccaccagttgttatcggcggattcgccgcatggagagcgtagggatcatcaaggccaaggtggcggtgctggatgaacgcaaattggggatccaggtgacggcgtttttcctgatcaagctggacagggacagccaggatattgaccgcaagatgcagcacatcctgtcgactcatccggagattcaggattgttacttgatgaccggggagtttgattttgtgatggtggcgaagtttcgggatgctgtggagtacaccgagtatatctatcggtttctggagacttatcgggatattccgattcggacttattcttctacgttggtggttaggacggttaagaagtcttatgagttgccgttgcagggggttgggttttgttctcggagttgagtacatatccgtttcttcggtaacggctacttatggttccgctcttacagcggctcacttttggaaaggccggaatgccggcccagccaaaagtaagcaaaaggccttcgccccaacactcggtgcctcgcttaggctcggcatgccctcactccggcttgaatccgtgggccgccgcaatgggccatccatggcccagtgcggctaacccggcgtcctgccgggttacccacggattcaagcctgcgttcggccagcgtgtttgacggggcgatcccagatcaaaagcaagagcgcggcggccttagagccgaccggattgtatggccggtactcggtcaaagtgtgggagggggcttgcccccgatggcagtgggtcagtcactgatgagttggctgatacaccgccatcgggggcaagccccctcccacagtttgatcttcatgtatcagttgaagcccccggtgtcagggtagttgtcgtgtcctccgctttttaaaagtattccgggggcggcaagagtaaggtcatgcctttctattcagaagaacgcaaagctgcgctgttgaaaatgatg

SEQ ID NO: 79 - DNA, 97904 bp, Pseudomonas nodulensis
  misc_feature (10675)..(11061): n is a, c, g, or t
agacacgcaactggaaccctatcgggacggtgtacctcaatcccgaaagggagctgacagttgtcgtgaaggtcgcctagcaagacgggagacacgacaactaccttgaaaaacgccgggggggtaaaccggcagggatgccggtttagccgccccgcgccatggatggcgcgtggcggcggcccccaaaatcactgtcggattacgggcacaccgagcctgggcgaggtgccgagtgttggggcaagagcgttttgcttacttttgcgcttttcaaaagtgagccgccgtaagggcggaaccataagccgccgttacctaaataacggatatgcccccgaaaaaaatgccccccacccaatcaaaaatgaagctttcatgacaaaagttcggtagcccatggccactcccgtctcctctgtgtaacgcgcttgagcccaccagaaaggtgagcttttcagccgcaagcaggatgccaggagtggggcgatgggaactatggaacgttactcgaaagtgggcatgcaggagctcgaccagcgcctgtcgaagatcgtcgaagcggcgcgcaagaagccggtgtcggtctatcgttatggcgcgccctgggtatggatcgtctcccaggaagactggcagggcgcccgcaaggaagtctcaagctacatcccggctggccattccctggtattgctgcgcccgcagatcgacgaagtgctcgaccagcaccgtgactggctcaccgccgaacccgcgatgtcgatccctgcgcagaccgtgctgcagatcctgctgctgcaactgctgtattcggtgcccagcgagcagcaactgcatgaacagctgaactacaacctgctgttccgctggttcgtcggcctggacctcaaccagaaggtctggagcgttcatgtcctgacgcgcgacatcgccacgctgctgaacaacccgcgtgcggtgcaactcatccagaaaatcatcggtgacgtgttttgtggcgccttgctgcacatgccggagttctccttgaacttcgccctgttgcacacctggctggcacgccacggcaacactgcgatcaccagcaattgagcaggccgcacgccggggattcggcgacggtgcgaacaatcagacagtcagggggcggtgtggagcatctgttcaaattaacgctggcgctgtgttgcgtgacgctggggagcctggcgcaaccggtgttggccgaggaagaggcggcggcgcgcaaggtcgacgtcaacgagtacttcgtgcgcggcaataccgtgctcgatgcggcgacgatcgaggaggcggtgtacccattcctggggccgcaaaagaccctgggcgatatcgaaggcgctcgcgatgcgttgcagaagatctaccaggcgcgtggctaccagtcagtgtttgtcgagctgccggagcagaaggtcgatgacggtatcgtctacctgcaagtgagcgaaaccaaggtcggccgcgtacgtgtggtcggggccaagcactattcaccggtggaaatccgcgagcaggtgccggccctggaggagggcgcagtgccggactttgccacggtgcaaacccagttggccggcctcaaccgcagcgccgggcgccaggtcacgccgctggtgcgcgaaggccagcgcccgggcacgatggatgtggatctgcaagtggaagaccagaatccctggcacgccagcctcggcctgaacaacgactacagcgccgacaccgagaagctgcgttcggtcgccacgctgggttacgacaacctctggcaactgggccacagcatttccctgacctatttcaccgcgccccaggacaccgacaacgccaaggtctggtccggttcctacagcgcgccattgaacgagcgctggaccttgcagttctccggttaccagtccgacagcaacatcgccaccatcggcggcagcaacgtgttgggcaagggccattcctacggcgtgtcggccatctacaacctgccggcggcgggaaattgggccaattcgttctcgttcggcgtcgacttcaaggacttcgacgagcagatgaaattcggctccagcagcgaccaggtgcccctcaagtacgcaccgttcaccctgggttacaacggctttcgctataccgaacaatcgcagctgggcctgggcctgaacctggtggtgggcacccgcgcgttctttggctacggcagcgatgccgaagagttcgactacaagcgctacaaggccagcgccagtttcgccgtgctcaagggcgacctgaattacacctacacctttgccaacgattggcagtcggcaaccaaaggcggcttccagctcgcgtcggggccgctggtctccaacgagcagtattccgccggcggcgccacctcggtgcgcggttacctggcggcggagcgtaccggggatgagggctacttgctttcccaggagctgcgcacgccgtccctggccaagttcctcggcagttatgtgcaggagtggcgcttctatgcgttcgccgaaggcgcgcgcatgcgcctgcacgacccgctgcccgagcaagaagacgaatacagcctggccagtgtcggcctgggcacccgcgccagtttgagcaaatggttgtccggcagcctggattggggctacccgctgctcgatggaccgaacacccagaaacaggactcgcgactgcacttcagtgtgcaggcgactttctgactttttcttccggagacttcacccatgcaacgcctattcctgagcctgttgatctgcctgggcttcgcgctcccggccaccgcccatgcctggtggcaggacgactggcactaccgcaaacagatttcggtagacaccaccgcccaaggcgccgcgatcagccaggccctgggccgcactgcactgctggtgcgcctgcacaccggcaacttcacttttgacggggtcaaggacgacggttctgacctgcgttttgtgagtgccgacgacaagaccgtgttcaaccaccagatcgaaagcttcgacccactgatgggcatggcgctgatctgggtcgatgtgcccaaggtcgaaggcggccagcgccaggacctgtggatgtactacggcaaccagaaggcaccggccacggccaatgggcaactgaccttcgacccgaactacaccgcgctgtatcactttgacggggccaatggcacaccagcccgggacaccacggcctacgccaacaccgcattgaacgccaccggcgcgagcatcgacggcgtgatcggccgcgccttgcagttgagcggccaagcgttgatgttgccggccagcccctcgttacagcacgcggcgggcggcgcgttcacgttcagcgcctggttgcgcctggaccaggccagcggcgagcaagcggtgctagcccgtcgcgacggcggccatagtctgttgctgggcctgaaccagggcgtgccgttcgtggaagtcgacggccagcgcgccgtgtccacccaaccgctgaaccccggtcaatggcaacacctggcgttcaccgccgagggcgacaagctcacgctgtatgtgaatggccgcgaaaccgcgaccctggcgcaggccttgccggcgttcaattctcagatcgccatcggcgccgacctgccggaagccggcagcacccacttgccattcgccggggccatcgatgagctgcgcctgtccaaggtggcacgcccggcagcactgttgctggccgatgccagcgcccagggcgccgagtcgaagctggtggcctacggcgtggatgaagaacagtccggctttggcttcggtagcctgggctttttgctcaacgccgtaccggtagatgcctgggtgatcatcctggtgctggtggcgatgatgttccagtcgtgggtcatcatgctgcgcaagaaccgccaggtcagccgcgtgagcagtgccaacgagatcttccgcgagcacttcgcgcagatcggcacccgcctggagatgtacgccgacgacgcacagttgggtgagcgcctggcccattcgtcgctgtggcgcctgtatctggtggcggtcaaggagatccgtacccgccgtgcccagggcgccgacacttcgtcggtgtcagccgccaccatcgaagccatccgttgctccatggacggtgtgcgtacccgcgagaaccaggccctcagctccaaactctcgaccctgtccaacgccatcgccggcggcccgtacatcggcctgctcggtacggtgctggggatcatggtggtgttcctcggcacggcgatggccggtgacgtcaacatcaacgccatcgcccctggcatggcggcggcgctgctggccacggccatgggcctgttcgtggcgatcccggcgctgtttggctacaaccgcctgatcacgcgcaacaaggaagtcagtgcggacatgcgcgtgttcgtcgacgagttcatcacccgcctggcggagatgcacggcgagagccagcacagtgaaaccgcgcaccgccgcgaacatcacgcatcggttccggcctgaggagaatcgccatggcttccgtaaatgcctcccacgacgatgacgatgacgcggccgtcgacagcatcaacatcacgcccctggtggacgtgctcatggtggtgttggtgatgtttatcctaaccgcgaccgcccaggtgtcgggcattcagattcacctgcccaaggccagcgcctcggtgtcgttgtcggaggccaagaccaaggccatttccgtgaatgacggcggccaggtgttcctcgacgcctacccggtgaccctcggcgagctggaagagcgcctgcgcatcgagaaagcgctgaacccggacttcccggtgatcgtgcgcggcgatgcgatggtgcagtaccagaaggtgatcgaagtgctcgacctgctgcgccggctggagctgtcccaggtcgggttggtcaccggcaaaccgagccagggctgagtcatgactgcacagatgccgatcaggccaccgcctgtgaaaaacacgccgccgtggcgcccgttgaagtggggcgccggccttttgctgggcgccgtcgccgcctggttcttgtggcagtgggccaatgacatgagcggcgtgcgccgtgaagcgccgaaggtgccgacgattatcccgttgccgccgccaccaccgccaccgccggaaaagcccaaggagcccgaaccccaggtcgaagaaaaagtcccggaaccggtgccgagccccgaacccgaggaggtcaaaccggccgaggaagcgccgccttcgcctaatgaagacttggccaacccgatgcagatcgatggcgacgcccagtccggcaatgacggtttcaacatcggtgccggcaagggcggcggtatggccggcagcggtggcggcgggttgggcaccggtacttataagcagtacctggccggcacctaccagcgcttgatgcgcgaagacccggagctgcgcaagaaggccttctcgatacagatagacctgtggttgggcgccgatggccaggtcaccaaggcgttggtggccaagtccagcggggatgccgagaccgatgctcagatgctcgccttgatccaggcgccgcgtgccacacagaaaccaccggcgtcgctgacgctacccatgcgcctgtccctcaagggccggcgcccggattgattgaatccttttttcaacggttttttacaggagttgcgtacacatgatctcccccgtgaatcgactgaccctggcggtcggcatggtcatcgcgaccctggtcggccaggcggctgcggccccggtcgcaccctcggaaaacgtcaccatcaacctgatccgcctgctggtgcagcagggcgtgctgacccaggacaccgccaacgggctgatcgcccaggccgaaaaagaagcccagcaggcgcgccaggccgccaatgccgcgccggtagtggccgcaggcccgaccgcagcccccggcgatgtgcgggtgcaatacgtgccgcaggcggtgaaggatcagattcgtgaccaggtcaaggccgaggtcatggccactgccaagcaggaaaactgggcccagcccaatacctttccggactggatctcgcgcatcagctttgacggcgacatccgtctgcgcgacgaatcgcgttacttctcgggcaacaacagcaacaacatcacggacttcgcgaaggtcaatgacaccggcccctatgacgtcaacaagaactccaacaccaagttcccacccttgctcaacacccgccaggaccgtgaaaacctgttccgcctgcgcgcccggctgggcatgaaagcggtgctctcgccggactggaccgccggtatccgcatcgccaccggctctgacaataacccggtgtccaccacccagaccctgggcggcggcttcggcaaaaaagatatctggctggaccagggctacctcacctggaccaccaccgactacatgaagttgaccgccgggcgtatcggcaacccgttctattccactgacatgatgtattccaacgacctcaacttcgacggtgtggccgccatcttcaatcactccctcaacagcgaatggggcgtgttcggcacgctcggcgccttcccgatcgaatacacctccgacaccgccagcgctaacggcatcgacaaggaagacagcgagaccaagtggctgtttggcgggcagattggcgcggactggaagatcaatcgcagcaaccgcctcaagctggccgcggcctattaccagttccaggacatcgaaggcgagcgctccagcccttgcgcgccttgggcgggtgcggcgggttgcgacacggacggcacgcgggtggcgttcatgcaaaaaggcaactcggtgttcaacctgcgcaacaacaccaccaacccggccgacccggcgaaaacgccggaccctcaattcgtcggcctggcgtccaagttcaatgtgctggacctcaacctggtctgggacagcgagttgccgagcgacttcaagttgcgctcccaggccaacttcatccacaacctggcctacgacaagggcgagatgctcaagcgcagcgaaggcgagatcgtcaacaacatcaacggcaagggccagtttgaaagtggcggcaatgcgctgatggtctcgttcaccctcggcagcgcgctggagatgcgcaagcgcggcgactggaacgtgctggccggctacaagtacatccagcccgacgccttgcccgacggcttcaacgattcctcgttccacctgggcggcaccaacgccaagggctacttcatcggcgccaactacggcatcgaaaagaacatctacgccagtgcgcgttggttgagcgcgtccgaagtctacggccagccgttcgaagtcgatgtgatgcaactggaactcaacacgcgcttttgatgcgcagggagatgccacatgaacacgcgaatctgcgggttgttactgctgctggtcgccactggcgcgtcggctgaaggcatggaggagcgcctgcgcacgcaactgcgcagcaccacccagcaattgcaggccctgcaaagcgagcaggcccaggccagcgccgcgcgcctggctgcggaaaaccaggccaagcaggcccaggcgcaaatcaagcaactgacggccgagctggacaaggcccgtggcgtggccgagcaaatggccggccagcaacagagcctgcacagccaggcgcaggcccaggtggctgccagcaacgagcagatcggcaagttcaagaaggcctatgacgaactgctggtgctggccaagggcaaagaggccgagcgggcgcgcttgcaggcccaactgagcgaacgtgacacacaagtgcagcaatgttcagtcaagaatcaacagatgtacggcgtagcccagcagttgctcgcggcctacgaaaaaattgacgtggccgaggtgatgagcatccgccagccgttcgccagcagcgcccgggtcaagttcgaggagctggcccaaggctttggcgacgatttgtacaagagccgtttcgatgcgccccaggcaactgccaatcattgatagacagggaagagatctccatgagcgaattgatcaccagcgtcaccacccagagcctcaccgagttgctgcaggaagccggttaccgggtcaaccagactgagcaaaacggcatcgtgcaattgctcagcgccagccagggcatcggctttgcggtgcgtttcggcaacccggcggcagagcagggcgcctatgtggatttcacttacagctgcgcgctgcggatccagggcgaattgcccgaaggtctggcccaggtatggaacgcctcacgccgttttgcacggttgtcggtgcagggtgaattcctgctgatggaaatggacgtggtggtggccggtgtcggcgctacgcacctgcgcagccagttggagttgtgggaccgtctgttgcaggaatttatcgtctacctgcgtgagtacagccaacaggccgcgcagttgcaggcggaagccgaggcgccggtactgtgaaaaagccaaccctgatggtcggagcgggcgcgctggccttgctggtggtggcggtgggcttgagcctgcgaccgggcagcgacccggtggcggcacagcaaccggcgccggtgacccaccctgtaccggtcggaccggcggtggcccgcttgggtaaccagcagatcgacctgacggaactgaaaaccgtgctggccagcctgcctgccgaatcccgcgagcaattgcgtggcaaccgtggcgcgttggaaacctggattcgctcacgtctggcgcaaaaggccgtgctcgaacaggccgacgcccagggctggcgtcagcgcccggacgtggagcagcaaacccgcgccgccgccgagcagattgtatttcgcgattacatgttgtcggtcagccaggtgccggccgattaccccagcgccgccgaattgcagcaggcctacgacagcggcaagtcgcagtgggtgacaccgccgttgtaccgagtgagccagattttcctcgcggtgaatgacccgcaagccgtcgacagtgtacgccgccaggcccaggagctgagccgtcgcgcccaggccgcaccgaatgatttcgccgccctggctacgcagttttcccaggacaccgactccgccgcacgcggcggtgactcgggcatgcagccgttgcagcaactggtgccggaagtgcgcagtgcggtgtcgcgcctcaaggtcggtgccgtgtcggacgtggtgcagagtgcagcggggttccatgtgctcaaactcaccggccagcaaccggcgcgcaccgcgaccctcgacgaactgcgtgaacgcctcacccaggccctgcgtgcccagcgccaggaacagatcgccaaggcttacctcgaaggcatgctcaataccgccaccctgagtatcgacggcgccgagctgaacaaagtgctggagtaacacgcgtcaacccgcattggatgcacagaccaacaagacagggagtctcccatggcatttctagaaccgtctgccccccaggggccctccgtttatcgcgtgtcaaccgagggccgcagcagttggctgaccctggcccatgagatcgacccggaagtggcgcgctacttcctggtgagtgcgcgctgcggttgtttcatgcaggcggcgcgcagtttgaatatcaaggcgacgctgttgcgcaagcgtctggcgcagttggaggaacacctgcggcattcgctgttcagctaccagggcaacggtttggtgctcagtcgcgatggccagcagttgcaagcgcagctgattgcactggcccatgaacgacgcttgccggtgacggagcagccgttgattcggctcgcggtggctgagccgatcctgcatgacatccttgggcgtgacttgatcgccttgctgcgccgcaatgccagcgtgcgcctggagatcatctccatcgacagccagttgtcgttgcaggcggtggatgtggacgtggtgctgtggctgtcggacgccgacgggccggtgcccggtccgagctttgccactgaaccgcctagggccctggcgcgtttgcagtatctgccgcatatcgccaagcgttattcgcggttgaccacacggccggacagtgtggaggacctcgacgattacatgctggtgcaatggcagccggatgcgcaggtgggggctttgcaggcgtggaaccaggtggtgcagcagcgcctggcggcagtggtgcaggtgcatgcgtattcgctgatgctggagatgatccgttgtggcgcgtgcattgggttgctgccgcattacatgagcagtttcgaccgggggctggtggcgttgccggggttgctggatgagcgtatgcagcgccaggtgtggttggcggtgaatgcgcaggtgcggaatgaggaggcggtgcggatgattgtggaactgatcgtcggaacgtttgagggacggcgggagtggtttgattgatagatttatcctcggccagcaaatccccctgtggcgagcgggcttgccccgcgttgggctgcgtagcagccccagtgaaggcaccgaggtattcctgaaagaactcagcgtcgggttttggggctgctgcgcagcccannnnnnnnnnnnnnnnnnnnnnnnnnnnnnnnnnnnnnnnnnnnnnnnnnnnnnnnnnnnnnnnnnnnnnnnnnnnnnnnnnnnnnnnnnnnnnnnnnnnnnnnnnnnnnnnnnnnnnnnnnnnnnnnnnnnnnnnnnnnnnnnnnnnnnnnnnnnnnnnnnnnnnnnnnnnnnnnnnnnnnnnnnnnnnnnnnnnnnnnnnnnnnnnnnnnnnnnnnnnnnnnnnnnnnnnnnnnnnnnnnnnnnnnnnnnnnnnnnnnnnnnnnnnnnnnnnnnnnnnnnnnnnnnnnnnnnnnnnnnnnnnnnnnnnnnnnnnnnnnnnnnnnnnnnnnnnnnnnnnnnnnnnnnnnnnnnnnnnnnnnnnnnnnnnnnnnnnnnnnnnnnnnntggtttgattgatagatttatcctcggccagcaaatccccctgtggcgagcgggcttgccccgcgttgggctgcgtagcagccccagtgaaggcaccgaggtattcctgaaagaactcagcgtcgagttttggggctgctgcgcagcccagcgcggggcaagcccgctcgccacaaagaacagttgtcaccgatgcaccgcggcgtgcgtatcgcaggcaagctctcacaagaaaagcagactgacggtcgccggcgttgcgcggctgggataagtgcgccagtcttggtggcctcattccctgggtctaagcacgctgcgatgcaagccacacgcctgacactcatttgccatgccctcacgcccctgcaaaaacaggggcgtttctgcgatgacgagccggtggcgatcgattggcagggcgcggccggctccctcgccgggcgttacaggaaaacgccgcgtttactctgcgctcctgagctgcgtactcggcagacggctggcttgttcggcaatgacgctgtgatcgaagacgccctgcgcgacgccgacttcggccagtggaaaggccagcccatcagccaactcaatagtgatgagttgaatacctggctcaccgacagcaccttcgcgcccccgggtggggagtcagtcgatgacgtgtgtgcacgcgtagcgcagtggctgaaaaccctcgaatcccaacccggccatattgtcgccatcacccacccctttgtgatccgcgccgcgctgttgcaggtgatgcagtttccgctgtcgatgttctaccgcatcgacgtcgaaccgttggccgccaccgaactgcgcttcaacaccgtctggcgcctgcgcctggaaactcacgcctgagcgcctgaacatggcagaatccacgccccgcactgagagcaacccatgaaacgcatcctgatcatcggcattggcgccggcaaccctgactacatcacgatgcaggccgtgaaggcgctcaaccgtaccgacgtgtttttcctgatggacaagggccagagcaaagacaagttgatcgacctgcgccgcgagatctgcgagacctacatcactgagccgggctatcgcttcgtggaggccgagtgccccgagcgtgtgcgcggcgatatcgactacaccaccgccgtgcgggacctgaaccgcgacaagcagcagaccttcgagcgcatgatcaacgaagaaatggctgacggtgaagtaggtgctttcctggcgtggggcgacccggcgttgtacgacagcaccatccgcattttgcaagcgattctggccagtggccgctgcaccttcgagttcgaggtaatccccggtatcaccagcgtgcaggccctggctgcacagcacaaagtggcgctgaaccgcatcggcaagtcggtcgagatcaccaccgggcgccgtctggcggcggggcaggcgagcgatgccgacaccctggtggtgatgctcgacgcggaagactcctaccgcaccgtggccgatcagggcctggacatctactggggcgcctacctgggcacgccggatgagatccttatcagaggcaaggtcagtgaagtggcagaagaaatcgaacgggtgcgcaaggcggcgcgtctggagaatggctggatcatggacacttatctgctgcgtaaaccctgaggtcacgtcccatgctcaaactgtttgccctggcactgaccctggtggttggcgtcgctcatgccgacgatacactgcacactgacttgccgttgtcgtacctggaacagacccagggcgatgcgcgcaaccagccgctggtgattttcctgcacggtttcggcagtgacgaagaggatttgttcggcatcaaggacgcgctgccgtcgacctggacttacctgtcggcccgcgcgccgatgccggtggacccgcatggctatcgctggtttgccaggaagcccggtgatggcgattacgatggcgagactgccgacctgcaacgcagcgcccggttgatcgaagagtttgtcggtaaagccaccgccaagtaccacacccagccggatcgggtgttcctggtgggcttcagtcagggcgcgatcatggcctacgaggtcgggttgcgccgcccggatctgctgcgtgggattgcggccttgagtggcagcgtgctgccggtactcaaggctgagctgaagccggatgtgtcactgggcaaactggcgattttcattggccacggcaccttggaccaggcgctgccttatgcctcggccactcgggcgaatgaggtgttgacgggactggggttgaagccggagttccacgggtatccgggcatgccgcataccatcagtgaaacggaagtgcaggacctgaaagcctggctggaaaagagcctgaattaaacgcggtcaaacattgtgggagggggtttgttccctcccacacttggatcgggttgtctggaagactgttatttcccgccggtaatctgcttcaccagcgccgcgtgccccttcgcatcatccgcgcgcgagattgcctggatcaccagcaggtgattgcccgaaccgcctaggaacgtggagttcagcgtcttgccgccgccctgggtggcggtgctgtccacttggcgcaggcccaggcccttgaaggtcagcttcttctcgctctgtttcttgaagtccggcagggcggcgctctggtccttgacgaagccggccacggcaccatccaggaatttggtgtcgttatccccaatggtcagcccatcgttgcgcacggtttcggcgacgatgactacacttttcgtggtctggttggcgtacatcgtgccttgggtgtcggcagtgccatcctcggccttgccggccggcagggtgtcggcggcgtaggccttgggcaagttaaaggtgaacttgccgcccaaggtggagatggtttgggtggtcggcttggacgcggcgaacacgctgccggcggtcagcgcgagggccagcaggacggcggtcttggtgaaagtggccatgaagcgctccagggatgaacgagattgcggcgtattctgtcagaaaaatcgcaatctcgttcactggcagcctcacaccttgtcggactcttcctccagccgatccatctcaaacagccgcgccagttctgcccgtgcttcctgggcggtttgcatcaccttggccgcgtcgtcgtacaccgcgtgttgcgcggccagcacttgcaggtcgtggttcttgaagcgggtgatgcgcgcgtcggcctgggcctggctcaagccgaggcccaccagggtacggcggctcatttccaggctggaatagaaggtctcgcgcaccggcgaggcgtccaggtcgaccaagcggtgcacgtgctggcggttacgcgcgcgggcgatgatctgcatgtgcgggtagaggttgcgcaccagttcggcggtcttgatgttgatttccgggtcgtccatggcgatcacgaagaattccgcctggtcgaccttggccgcgtgcaggatctcggggcgttgcgggtcgccgtagaacaccggcatgccgccgaagctgcgggtcagctcgatggtttccaccgaggtgtccagggcgatgaacgagatgttctgtgcacgcaggattcgcgccacgatctggcccatacggcccatgccggcgatcaccacgcgtggcgcatcgctttcgatggtgcggtattcctcgggcacttccaccggcttgaccttgggcttgaacagcttcgggcacaccagcagcaatagcggcgtcaccgccatggacagggtgatggtcagcaccagtatgtcgtagaggtgcggttcgaacaggccctggtcgcggccgatcttgaacaccacgaaggcaaactcaccgccggccgccagcaccacgcccaggcgcagggcgctttcgcgattgaggtcacccaccatgcggcccacggcatacagcagcggcaatttcaggcctatcaacagcagcgtcaggccaatcaccaccagcggcgagctgagcaacaggctgaggttggcgcccatgcccacgctgatgaagaacaaccccagcagcaggcccttgaacggctcgatctgggattccagttcgtggcggtactccgagtctgccagcagcaggccggcgaggaaggcgccgagagccatggacacgcccaccaattccatcaaccacgccgtgccaatcactaccagcagcgcagtggcagtggacacttcacgcagcccggtcttggccacgatgcgaaacaccggccgcaacagatagcgtccgccgatgatcaccacggcgatgctgccgaggatctgcaacacatgctgcaggccctgggcttcggtggtcgggtgatcgctgccggccagcagcggcaccatggcgatcagcgggatcgcggcgatgtcctggaacagcaggatggcaaaggccaggcgcccgtggggctggttcagctccttgcgctcggccaggctttgcaggccgaaggcggtggacgacagcgccagacccaggcccagcacgatggcgctgttccacgactggccaaacagccacaacgccaccacgcccatcaccaggccggtcagcagcacctgcgccaggccgacgccgaacaccgccttgcgcatcacccatagacgcttgggtgacagttccaggccgatgatgaacagcagcaacaccacccccagctcggagaactgcgcgacgctttgcgggttgccgatcaggcccagcaccgacgggccgatgattacaccggcaaacagatagcccagcaccgcgcccagttgcaggcgtttggccagcggcacggtcagcacggcggcgagcaggaacaccacggctgcttgtaacaggttgccttcatggggcattgcgaactccaggatctttaaaaccaatcaacaggcgggtattagagcgctttttacatttcgataattgtgtttttgcggcgtaggagggggatagcgcagtgtttttcaagggcgcgagctttctgccggtgcagtggaaggatgtacaaacaatttcccaagcgccgcaggtggaaggccgggcacttcgcctcctaatttttatgctcttgagtttatattccatgggtggcatatttcatgagctgggacgttgaatacacggatgaattcggagactggtgggaggatttgggagcaaaggaacaagtttccgtatccgctagcgttgatctgctggtgcttttaggtccgggcctgggctttccccacagcagcgctatcaagggctcccggcatggcaacctgcgggaactgcgcatacaacacgccggtcggccgtttcgtgtgttgtatgcctttgatccacgccgatgtgcgttgttgctgatcggtggagacaagacaggacaacatcggtggtatgaggaacacgtcccgatggcagaaaagctatatgacgtgcatttggaaacaatgcgtaaagagggccgtaaccatggctaagaaattcgctgagcttcaagcgggcatgacgtcacaagcccgcgccgaagccaagcagttgttccagcaacacatgcaggaaatgccgctgcatgagctgcgcaaagcccagcagttgagccagcagagcctggcgaaggcgttgaatatcaaccaggcggccgtctccaagatggagcgccgcacagacatgtacatcagcacgttgcgtgactacatccgtgcgatggggggcgaactggaaatcatcgcaaccttccccgatggccaggtcaagatcgataatttcacttattgaaagcattgcaaacgcccggcgcgtgccgggctttgttttatccggctatttatcgctttgcatgaccgcaccttgcccgaccggtgcgaggttcaccggccggcgatacaagcccaccgccagcccggcgatgatgatcccgatcgagatcaggttcggcgtggaaatacgctcatccaggatcagcatcgaactggtaatgccgaacaccggaatcagcaacgacagcggcgccacggtggacaccgggtacaacttgagcagcgagttccagccccagtaggcgaagtgcgtggccaggtacacctggaacagtatcgacaggatcgccgtcaggtcgagactgctttgcaaaccttcgaacgcggcgctgccgtgcagcagccaggcggtgaggaacagcgggatcggcgggatcaggctggcccagaccatgaacgagaagatctccttgacccctgatttcttgatgatcacgttgcctacgctccaggccaccgcactgaggacgatcagcatgacgcccagcaccgcgtggttgccttcctgggtggagatgatcccggccaggccgatcaaagccagcacggcgccgatcatctgcgcgccacggattttctctttgaacagcacaaagccccagcccatggtgaagaacacgctgagttgaatgatcagcgaagcaatacccgggctcacgcccacctggatgccgtagttgatcacgccccacatgcccagcccgaagataaaaccgtaggcggccacgtagctgaacttgacggccgggcgcttgataaagaacaccagtggcaaggcggccagggcgaaacggattcccgtgagcacaaatgggtcgatggcacgcaggcccagcttggtgatggggaagttgaccccccagaccagggtgacgagcacggcgagtgacaaatgttttttcagcatggaccctccttgggtcaggcggcacagcgcagttgcaatgtgccgccgggaagtcagttcaaggcgaaccgtttttgcgtcaggcgcagcccggcatttccggataccccttcgaacgaaccaaacttgggcagaggcgattttaggtggcagatgattggcccgcttgctatgtcaggtcatactttgacaaaatcgggccatgtcgccgaccttcaccttatccccttacgaactcgatagccctgctgcggtggtgacgctgcgcgagtacccgtccggcacggtgttcccacgccacacccaccggcgcgggcagttcgcctacgcatccaccggcgcgttgaagatgttcacggagctgggcaattgggtggtgccgccgcagcgggcgatctgggtaccgggcggggtggcgcacgagatgcacatgcgcggcgatgtggtgatgctcaatacctacctggacgatgacgcggcccgacgtgcagggttgcaggaccattgccaggtgtttgctgtatcgccgttattgcgccacctgttggaagcggcgctggcgattgggccatcggcttcgcccagcgtccgtgattgctgcgtgctgaccctgttgatcgacgaaatcggtgccatgcccgagttgccactcagtgcgccgttgccgtccgaggcgcgcctggcccgttcgtgtcaacgcttcctggaggcgcccacgcagaacatttccatcggtgagatggccgactggtcgggcatgagtcggcgtacctttacccgtcacttccgcgagtgcacgggcatgacctttgtttcgtggcgccagcaggtatgcctgctggaggccacggcacggctcagtcatggctcgtccatcaccgatgtggcattcgaattggggttcagcagttccagcgcgtttacgtcggtgttccggcgtaacctgggcgactcaccggcgcgctacctggccaagtccaaggcagcttccctgttctgaacggaggaggcggcgaccctggtgcctttttcccagcggtacggcgttgagcctcgccctttgttactatcgccgtcccttgtcgccaggagtcacggccccatgcagcaccagtgggatgaaatgcaccgcacccgcaagcccacgttcgtactgtgcggcgagcctcagggcgacgtgctcaatctctatgttcacggttattcggcgttcttcaaccggcaacaactgggcaacttcaaggcgcagttggcgagtatcgaaggttcgaccaacctgatgctgttctggccggcggggcatttcctggaaaacctgtttgcgcctttcaaggaggtgatcggcgcgatgctgggcggcggtagcctgggcgcggcaaccgtcggggtgggcaaggcgcttgcctattttcttgatcactacaaaagcgtcgaggcgcgggtggacgaagtcgccaaaagcctgctgccggaactggccaattacctgcacggtgaatcccttgatgtgcggcgtatcaacctgatcgggcattccctgggcgcgcggatcctggtcaagagcctgctcgccagccccgaaaccgcgcgggagctacccttggacaacctgctgttgatgggcggcgcgatctgtacgtcgagcccttgggatgtcgtgtcggcgccgctcaaggggcgggtaatcaactgtcactccagcaaggactgggccttggccataaagccggacaccgaacgctgcatcggtcgttatgcgatcccggtgacgccggccctcaaggccaaggtcaccaacgtgcacctggcgactttcgatcacgccgcctattggccgcaattgcagacggtggtgcagtacaccgacctgctgcatgaacggcgtggcatgatccgctccgaccagcgcagtgctgaagtgcgttttgccgaggaggacatcgatttgttccctgcgctgatgcaggcccggccggaagaggtgaagttcctcgccgaattgatggcgcaaaaacgcagtgcatcgatagacgccacggtgcgcgagccgctcaagttggctattgagctgcaacgcatgggcggcgataccttcatgaacctggcccgtggacatggcgtgggttatcgccagatcgccgaagatgtggtgcagcggctggggatcaagttcgacgagccgctggatacggtcgcactggccgatctcgaagcccgggtcgccgagaaactcatcgaacagtacaaggacaaactcagcaacacggaccgacaggtgttcgacgcagaactcaaagcggccgctcaaaaggagcagggcttgttcagccgttttgacgtaggccggtcggccaccaccgcgttgagcggcacggcgttggccgggctcaccggttttatcctgcgccgtggcgcggctacggcaatcccggtggtgggccaggcgttggcggcggcgatgctggtggtgagcggcgtgcgtgcattttccggcccggcgtattcgatcaccacgttggccgtgctggtgatcggcgtgattcgccagcgcatggagcgtgaagcgctgaaccaggagatggacctggtggtgcaggtggtggaggcgttcgacctgccacgggacacggtgatgcgcacggtcgtgtctgactgataagctgcacccttgtcttgtgtgtgcctgggataccgcgtgaaattcagcctgccgaaaattgctaccgccccgttctgcccgccggaagtggccggctccgtcgccgtggaccccaaggcttcgttcttcaagcgcatgttgatgttcgccggccctggcctgctggtctccatcggctatatggacccgggcaattgggctacggccatcgaggccggttcgcgctatggctacagcctgttgtttgtggtgttgctggccagccttgccgggatggcggtgcagtgcctgtgctcgcggctgggcatcgccaccggcaaagacctggcgcagctgtgccgagagcgttacagcacgcgttctgcacgcacccagtgggtgttggcggaaatctccatcatcgccaccgaccttgccgaagtgctgggctgtgccctggcatttcatttgctgttgggggtatcgctgaccactggcattgtgatcaccgcctttgacacgctgttggtcctggccctgcagaatcgtggtttccggcgcctggaagcgatcatgctggcgctggtggcgaccatcggcgtgtgtttcttcatcgagctggtgctgatcaaaccttattggcccgacgtgttcagtggtttcactccgtcactttccgcgatcagcgacgccgcgccgctttacctggccatcggtatcctcggggccacggtgatgccccataacctctacttgcacagctccatcgtgcaaacccgtctgatcggcaaggacctcgccagcaaactggacgcggtcaagctggcgcgcatcgacaccatcggttcattggccctggcgctgctggtcaacgcggcgatcctgattctcgccgccgctgctttccacaagaccggccatactgaggtggtcgagatccaggacgcctaccatctgcttgacccgctggtgggcggtgccttcgccagcatcctgttcggcattgcgctgttggcctccgggcaaagctccacctttaccggcaccatcgccgggcaggtgatcatggagggctacctcaacctgcgtattccctgctggcaacgccgcctgatcacgcgtgggctggcgctgattccggcgtttctgggggtgtggctgatgggcgacgatgccatcggcaagctgctgatcctcagccaggtggtgctcagcctgcagttgccgtttgcgctgtatccgttgatccgcatgaccggcgataaacagctgatggggccattcgtgaatcggctgccgacgcgcttgttggcgtggtttctgtttgcgctgatcagtggggcgaatgcctggttgattgggcagtgggtgttcgcttgaggcggtacagcgttctagatgagttagaccagaatcgccaaggacgtgtattgggcgatgtgtggatcggccgtcaatagcctcatgggttcgcttatggctgtcgcaataatgagccgatcaaaagggtccttgtgatgctgctcgagatccttgactgcgatggcatgttccgaggtgacgggcagttcggcaaatccgctttccaggcagtactcacggatttcctccaagtctacggtgagtttccccaggccgaccttgattgccatttcccagaatgtcgcagcgctgatgtaaacctccgctgcattctctatcagcttcctggctttgctggatagcctggggtcttccgtcagggtccagagcaggatgtgggtgtctaacagcactctcacggatgcttgccttcgaaggcatccagcagggcgccaggcaggggtgcgtcgaagtcttcgggaatgacgaacttgcctttcatggcaccgattctccggcttttgcatttccccacgggcacaagttgtgccatcgcacgtccatgcttggcaatggtgatgaccttgccagcagcggcctcatccaccagttttgacagattgtttttcgcttcgcccaaaggaaccgtgatcatgtggttatccccatattttggccaaatatagccaaaactgggtgcgctatcaaagacggccagaccgctggcggacgcggcgcgctcagatcgcgatggtttgtgatacgtgactttcatggcagttctctaaaagaggatgttgcgcaagtctgccgtaataggcttggccacaagaatactggcccgaaaaaacagaatggaactacttcctgctgtaggaaaactcccgaaccacttggttcaccgatcccaatacggcacggccccaaaacactccacaaaataatcaatcaccgtccgcaccttcagcgacaggcgccggctgcctggccacagtgccgcaatctgctgcggctccagggttgtcgccacttcatagtcggtcagcaccgcctgcaacgtgcctgcgcgcaagccttcgccgatcaaccaggagggaaacaccaccagccccaggccttgctcggcggcatgggtcaaggtgtcggcatggttgccggtgatcggacccttgacgctgtagggcgtccagtcgccctggcccttgcggaaaaaccagcgttgctggccggtgatgcctttgtaggccaggcattggtggtcgatcagttcgtcgggatgttgcggcgtgccatgccgggccaggtaggcggggctggcggcgatgcgaaagcgttggggcgcgaagatgcgagcctgcatgctggaatcgttgagcacgccgatgcggaacagcaggtcagtgccgtcctgcagtggatcgacgtacgtgtcggtctgctggatgtccagttgcagcttcggataccgtcggcacaactcacccagccacggcgacaggtggcgctggccgaacaccatgggggcattgatgcgcaccaggccgctgggttcgctttcctgttcctgcaatgcctggctggcggcttcgagttgttccagcatcaaccgcgcatgccgccccagcagacgaccggcttcggtggggctgaccgcgcgggtgtgacggtagagcaactgttggccgagggcctgttccatcagctgtatttgtcgggagatggaggagggcgccaggccttcgcggcgggccacttcggagaagctgcccaggtccagcacggccacgaacaggcgcagtgccttgaaactcaattcattcaagccttgcatcatgcctccaggctgtgcgtttttcgcaaaggtgttgtcagcatgctcccatttatcgcacaggacggccaccggataatgcgcgccatgtttcctttcttgaagtgcaggtgttgtatgcaggcaagttctatcgagggtgtggcgcaagccaaaccgaaaaaaaatggcttgaggttgctgttgttgccgctggtgatcctggccggcatgggcctgtcggtagaggccggtttgctcggcccgctaggtgtgcaggtggggcatttgtgggcgaccctgagcattttcggggtgggctcggcgatcctgtatctgctgctgttgttcagtggccagcaaaagggcccggcgctctccgaactgccgcgctggcagttgatcggcgggttcctggggccgatctatgtggtggtgctcaccctggccacgccacatatcggtattgcgatgaccatgatcgcgattttgtccgggcaagtcggcaagagtgtgctgatcgaccatttcggctggttcggcgcggcgcgcaagcgggtcaatggcgaacgctggattgccctggcgttgattgtggtggcacttgttctgattgcacgaggttaaggcgatgaatctgattctgttactggtcgtggtggttgccgcaggtgcggtgttgagcgtgcaggcggcgatcaacggtcgcctgggccaggcggttggggtattgcgtggcagcctggtgaccttctcggtgggggcgattgtcaccgcgttaatgattttcttctttgaacccgtccagacggtgagcctgctggacgtgccgaaatggcaactgaccggtgcgttgttcggtgtggtgtacatgatggtgatggtcggcgcggtgccggtggtcgggacggccgtcgccaccgtcgcggtgatcgtcgggcaattgggcatgggcatgctgatcgacaacttcggctggctgggcaacccggccatcgagctgtcgagcagccgcatcgtggcgatggcctgcctggcgttggcgctggtgttcatgtaccgcagcaatacccgcaccgactgaggggttgaaccatcgacggcgggccgcagtcactgcttaaggtgccggcgcccgccgcaccgagacgaccatgaagaaggagtctgaccatgccagataaaacctgtgcctgcccacactgcaaatgcgtgctgggacctgatgcggtcatgaaggacggcaagggctattgctgtcagggctgtgccgagcaccatgcccatggtgagccgtgtgcggctgcgacggggtgtgagtgtgccaagtctgccagaggctagcggtgtttgaaccggtgggagcctgcgtgctcccacacggtttaccggccgcaaaaatcactcggattgtcgtgccgcggtgattaccatagcgactctccctcgaatgatgtgcaccccatggccctggccgcgccgcctgacctcagtgatcctgccgttcccgtgcaacccctggcgcgcacctatccgcgcgggctctacgttgagccccacagccacgactggggccagttgctctatgccatgagcggcgtgatgtgggtcgagaccccgcaggaagcgctggtggtgccgccacagcgtgccgtgtggctgccgcccggcgtagagcatggtatccgcgtggtctcggacttgcagatgcgcaatatctacctgcgcccggccctggccgcaacgctggacagccaggtgcaggtgatcgaagtcggtgggttgttgcgcgagttgatcgtcacgttggtggacgagggcgacaacggtgaggtggcgtactacgacgcgctggtcagcctggccttgctggagctgcaacgggcgcgccgctcgccgattcgcatcgccatgccggtggaggccgaccgccggctgatcaacgcctgccaggcggtcatggctgcgccgtcactggagatccctttcgagcagcatgccgaaaccgccggtgccagcgtgcgcaccctggcgcggttgttccagaaccacctgggcatgggttttgccgaatggcgccgccaggtgcaactggccacggcggtggcggagttgatccagggccagtcggtcagcgccatcgcgcgttccctggggtattcgcccagcagtttcagcgacatgttccggcgtgaactcggtgtggcgccatcgcaatacctgggctgaggggttggccgatagcctgaagcacttggccgatgcttcaggcatgcgctctctacactgagcgcatccacccacaaggcgctgccccatgaactacctcatttcccttgccatcggcctgtttgtcggcgtgatctacggcgcactcgacttccgctcgcccgcgccgccggccatcgccctggttggtctgatgggcatgttactgggcgaaaagctctggcccatggggcggcaactggtgggcacctggttctcctgatctctttttatttgatggatattggccatgaaagcactgcaatttactgccaccggcgacctcaacaccctgcgctttgtcgacgtcgccaccccggtgccggccgtgggggaagtgctggtacagatcaaggccgcgggcctcaaccccagcgacgtcaaaaacgtgctcggtcgtttcccctacaccaccttgccgcgcatccccggccgtgatttcgccggggttgtggttgaaggttcgcaggcgctggtgggccaggaagtctggggcaccggccgtgacttgggcttttttgccgacggttcccatgcccagtacctcaccgtgtcggccaagggcgtggcacataagcctacccacctgagtttcgcccaggccgcgagccttggcgtgccgtacaccaccgcctgggatgcactggagcgcagcggcgtgacccacggcacacgcctgctggtgatcggtgccaatggcgcggtgggcagcgcggccctggccctggcaaaaatccgtggtgcccaggtgctggccgccgtgcgtcgcccggaacaggtcgacgtcttgcagggccagggcttcgacgcgattgccctgggcaagccggaagagctgggcacgcaggtcaacgccgtgttcaagggcggtgcggatgtgatcttcgacaccaccggcttctggctgccggccgccgtggcaggcctggcgcccttcggccgcatcgccattatcgccgcgccggtggacggccatgtacaactgccggccctggcgttgtaccgcaagggtggttcggtggtggggatcaattcgttgctctacaactgcgagcagtgcgccgtgatgctggagcagttcgggcggttctttgacgaaggcttgttgccgttgcccaccggcctgcgtgaagtggcgctggccgatgggctgcagtgcttcgaagaggtgaaccagggcagcgcagacaagatcatcttcctgccttgatcctggcggtcatgcctcgggaacgcctttctcccaggctgaccagttcttgaggattgcctgtaccaatgggttgcccgtgcggtacaggttctccagcgccgggacaaaaccgccctggtccgcgtacttcaacaggttatccacttcgctgtagcccgggtacggccggtcgaaatccgaaccggcgcgcaccaccgccaggcgctggatgtccaccaagccttcgcggctggcgcgcaacagggcctcataggtggagttgtcttcctgctgggtggtgcagtactcgcctttgttgtcggtcagcagcttggtccacacctcggcgcgctcgctcaagcgtgtgccggaaaaccaggtgttgcccgccagggtgtcgcagcgggtgacttgcggcggctggttggccggcgcggcggggtagtgtttgcgccaggcgctggattccttgctttccgtcagctcgactttctgcgacagggcaaacgccttggcctgcaacttggggttcagctcaaacacttcggtcttgtagtccagcggtggtttttcgttggggcccttggtgttgatgcccagatagccggtcggccaatccttcggcgcatcccgcgaatccagctcccactgggtgccgaattccaccaggtaatgtgcccacgcggcggtgccgatcgtgccgtgcttggggctgataccggcgatcccggcgatcaggaagtagctctggcgcaggtcgaacttgggcgacagcgccaaggccagggtggaggccgcggcgttggtctggcccatgccggtgaccagcaggcaaacatcctgggtattgcagcggatcaccggatactcggcagacaagcccggtacgcgcacttcctgcttgagttccaggcggtcgatccaggtttgcgcctcgggggcgaacatggtgatcagcatcaccttgggcttgatcggtgcgggtgcgtcggccagcaccacttgaggcagaacggccaggccaacagccattgaaagacgggtaaacgcgttcatctaaagctccttgatcagaattgatagcccacgccggcgtagtaaccccagccgtccgagcgggcgcggaaattaccttcaccgaaattcaactcgctgccgtcttcccagttgccgccgttatgaaagtaacggccgaccagggtgaaacgcaggtgggtgaacgaatacagcagcacgttggtggccaccagggaattggccgtgcgtgccgggttgtccttgtgcaggtccgagccaaaatcgtagttggtaaagccgatgtaggtcagcgaagcgccgttatcgaatttgccgatgggcacgatgtacttcatttgcgcacggtagccgtcccaggaatattcgttgctggcgccatagttttcccactggtaacgcccgtagaagttggccgacaggttgacccgcgagtgggtgtcgatatcggtgcccaggccgctgtacagcgtatttgcgcggttggccttgttgctgccgtggtcgtagatccagtcgaaggccacataccattccttgaacggcccgatggccaggctgcggcccgccaggtagtcgatggaaatacgcggctcatgttccatgaacaccggcgagccatggtcccacacgcccttgtcattactgttaccgatggtgaggatcttcggcacgtcgatatagccgtacagctcgaaaggccccttgcggccgaagtactcgtactccagatagacgtcatcctgcggcttggggccgaagctgatgtctttgctgccgatcaacgtcaggtcctgattgaaccagtccgacaggtacacaccttttttcgccgggctggcttcagggctgagggtttcgccctgtgctgagtcatcgatgggtttttcctgcgccaaaaggggcgcgctgagtagtcctgtaacggcagccagtagcaaggaaacaccaaaggaggtaggacgccttgaggtgaagtgcattgaaaatccctattcgtacgcggtttgaacccgattcttcgggtggaggtgaacttggttgccaagttcgtaccgcaaacgtttgcacaggctgtaccaactttgctcaatcgattgatcagcttggaaaaaaactaaattagtcgaccttttggtcaaaattgactgggtgtcatttttcaaggcgttggaacaggtgcatcgcggtttcccgccgatagtcactcggcgtttggttcatctcgatgcgaaagtgccggttgaaattggacaggttggcgtagcccacttcaaagcagatgtctgccaccgacatatcgctttgcagcaacaaccggcaggcgcgctgcacccggaacttgcgcatcaggtcgataaaaccgtggccggtgttgcgcttgaagaagcgcgaaaagcccggttcgctcatctccaactgttgcgcgatcaccgacaggcgcacatcgccggtcagctcgcgcatcaaatagtcgaatgccttgttgatgcgttccgcgctgcgcgcatccagggtcggcgcgtagcaggggctggccagggccttgacctgttggggcggggcgtttttcagggtgtcgagcaattgcaggaacaggatcaagcgttgcaggccctgggcgttaccgatggcttccatccaatgcgcggcctgcagcgccgtgtcgccggtgaactccagtccacggcgggcctgttcgaacaacggctgcaggtcgccgagctccggcagggttctgcgcaaggcgaggagggcggcgccgtcgaattgcagcaccacgtcgcggccggtgaggtattcgccgggggccagttcgccgatccagtcgtggggcaggtcggggccgatcagtgcgacatgcccggcgctgaaggcaccgatgtagtcgccggccaccagtttgccgctgccttggcggatcaagtggatttcgaattcggggtggtggttccagcgggccaggtcgtagggatagtcatgttcgaaccagcggaagcagtggtccggctcgggcaggatcacttccagttcggcggggcggtgctcgaacagcgtggcacggctgatgggcatgagcgggcttcttggggttcttgtaatcgcttcaaaatacgcgcctcgggcgttcaggcgctacccccgcttgcgtccggcactgatacttttttaactcgcgcgtccccggttaaaaaagtaccagtcgagcatccgtcacgggtttgtgagtgcctggccaagctgctgtaatcggcgctcaacaacaaaaacaacaggtggaaaccgccatgttcaagctcccgcaagcgttgttcctgctgtccggcctggcgttggccatgcccagccacgccgccgacaccgtcaccatcgccacggtcaacaacagcgacatgatccgcatgcagcgcctgtccaaggtgttcgaagcccagcacccggacatcaagctcaactgggtggtgctggaagaaaacgtgctgcgccagcgcctcaccaccgacatcgccacccagggcgggcaattcgatgtgctgaccatcggcacctacgaaaccccgctctggggcgccaagcactggctggaacccttgacccagctgccggccgattacgatgccgacgatatcttcccctcggtgcgccagggcctgtcggtcaacgacaccctctatgccttgccgttctatggtgaaagtaccgtgacctactaccgtaccgacctgttccagcaggcgggcctgagcatgccggcgcacccgacctggacccagctcggcgagttcgcgtccaaactcaccgccaaggacaagggccaatacggcatgtgcctgcgcggcaaggccggctggggtgagaacatcgccttgctcagcaccatggccaacgcttttggcgcgcgctggttcgacgagcagtggaaacccgagctgaccagccccgagtggaccgcagccgccaacttctacgtcaacaccctcaagcagtacgggccgccgggcgtgtccagcaacggcttcaacgaaaccctggcgctgttcaacagcggcaagtgtgcgatctgggtcgatgccagcgtggctggctccttcaccaccgataaaagccagagcaaagtagccgacagcgtaggtttcgccgccgcgcccaccgaggtcaccgataaaggttcgtcatggctctacgcctggtccctggcgatcccggccacctccaagcacaaggacgccgccaaggcctttatcagttgggcgacctccaaggactacatccagctggttgccgacaaagaaggcatcaccaacgtgccgccaggcacccgccagtccacctataacgaggcgtatctgaaggctgccccgttcgcccaggtgaccctggagatgatgaaacacgccgaccccgcgcacccgtccgccaagccggtgccgtacgtcggcatccagtacgtgaccatccccgagttccaggccatcggcacctcggtcggcaagctgttctcggcggcgctgacgggtggcatgtcggttgatcaggctttgctgcaagcgcagtccactaccgagcgcgagatgaaacgcgccggctatccgaagtaacttttgacgggacatacccatgaaacgactggaaggtaaaagcgcgctgatcaccgggtcggcgcgcggtatcggccgcgccttcgcccaggcctacatcgaagagggcgccacggtggccatcgccgatatcaacctgcaacgggcccaggccacggccgccgaactgggcgcgcaggcctatgccgtggccatggacgtcaccgaccaggcctccatcgacggtgcgattgcggccgtggtggcccaggctggcaagctggatatcctggtcaacaacgctgcgctgttcgacttggcgcccatcgtcgacatcacccgcgacagctacgagcggctgttctcgatcaacgtcgccggcacgctgttcaccctgcaggccgcggcgcggcagatgatcagccagggccatggcggcaagatcatcaacatggccagccaggccggacggcgcggcgaaccgctggtggcgatctattgcgcgaccaaggcggcggtgatcagcctgacgcaatcggcggggttgaacctgatcaagcagagtatcaacgtcaatgccattgctcccggggtcgtagacggggaacattgggatggcgtggatgcgttgtttgccaagcatgaaggattggcacctggcgaaaagaagaagcgggtaggggccgaggtgccgtttgggcggatgggcacggcgcaggatctgaccgggatggcgatcttcctggcgtcaaaggaggccgactatgtggtggcgcagacctacaacgtcgatggcggcaactggttgaactaggacccaatgtgggagggggcttgcccccgatagcggttgggcagtcacagttgtgcaatctgacccactgctatcgggggcaagccccctcccacagttgagcctctttgttcgttgactcggggctaatccgcaaagctgcggtcgaagaagtaaacctctccaggcttgaggttctccaccgttgcctggggcctgccgccttcaccctgtttcttgcgcccggtctcacgcaagtacccggcctccgccagcttcaacaaccgctggcgaatactggtcttcaacactggccgcgccagcaccagggaaaaaatcgtggtcgcttccggcgcactgaattcattgcccagaaacatcagcggcacgctgctgtacaacgacttggaaaacaaacgttcctgcaccttcgccacaatgctgttgtggtcgaacggcaacttgatgccgccactcgccaccgccgtcagcgaaaaccagccctggtgctcacccagcgtcacgtcctcgttcacgatcgccaggtaatgggtggacgacgaccagcagcgcggatcgcgaaacgcatcccccaccgtccccacctgttcgctccaggccaggtccagtccgaccttgtcacttgctcgcaagcgctccaccgcatcctcgaggctcagatcttgcacgccgccattcaccaccacccccggcaacgcccagtgcccggcgaagggctcggcgtcgcgctggttcagcagcagtttcagttcgccagaggcacggcagtaaaacagcacgcacaggtcgacggtatggaggtaggcgctacggggcatgtgatgtccttctaaacagcagtgcggcacagtctaacggatcgaacagatatgtcatgtactgactccaggatagataagtaaatgtttcttgcaatgaaagtacatgacgtgtacttttgtttccaggccacaggagaaccaccatgaccctcgcgacaactgccattgcctcattcgacgtcgacgcccagaagagcttcacgccgctgtgccccaacgagttgccggtggccggcggtgaccggatcggcgccgagctcaactacatggccagccttgccggccatcgtatcggcagtaaggacgcccacaccccgcacgcgccctgggtggtggcgcagcacagcgacatgttgcaacccaccggcctggaccacgccgatgtgacctgggtgagtcactgtgtgccgggcaccgaaggcttcaacctgctggacgagttgcccacgccctatgactacgactacttcatctggaaaggcgtcgaacccgacctgcatccctacggcgcctgctaccacgacctgcacgacaagctgtccaccggcgtcatcgagtatttgaaaggccaaggcgtggttcgcgtgatcgtcggcggcctggccctggattactgcgtcaagaccaccgcgctgcagttgctcaaggccggcctggaagtggtactgcacttgccggcgtgccgaggcatcagcgaggagggcggtgtacaggcggtcaatgagttgctcaaggccggtgctgcgatcagccgcacccgcgaagaactggccgcgatggccacgcgttaaggagaaacaccatggaaagtgcctacgactacgaatccccggtgatccagggtttgctcgacaccgattactacaccttcaccatgatgcaggcagtgttgcaccagtaccctaacgtcgatgtggaatacaacttcatcgtccgctccagggaaaaactcggccacctgattcctgaaatccgtgccgagctggagaaactcgccagcctgcggatgcgcgaaggcgaactgcgcttcctgttcaaccctcgttttcgcgaatacctcaccccggattacgagcgcttcctcggcttgttccgattcaacctgcgctacatccacgtcagtgaagtcgacggccaactcaacatccgcgtggttggcccgatgctgcactgcatcatgttcgagcaaccggtgctggcgttggtcagcgagctgcgcaaccgagacaaataccccgacgtgaccctggaagacgtcacccgcaagctctaccagaagttcgactggctggagaaaaacctcagccgcgatgaactggccgacctgcgtgtgtcggacttctccacccgtcggcgcctgtcgttcaaggcccagcgcgaagtggtggacatcatgcgccgcgacttccccggccagttcgtcggcaccagcaacgcgcacttggcctacgaattcgacctgccgctgatcggcaccatggctcaccaatggctgatggtgcaccagcaactggggcgcctgcgcgagagccagaacgccgccctggaaaactgggtgcgtgagtaccgtggccgcctggggatcgccctgaccgactgcatcagcaccgactttttcctcaaggacttcgatctgtacttcgccaagctctacgacggcctgcgccaggactccggcgatcccatcgtctgggccgacaaggtactggctcgctacaagcagctgggtatcgacccgatgaccaaggacctgatgttctccgacggcctgaacttcgaaaaatgcctgccgatcctgcgtcacgtgcgcggcaaggccaagttcggtttcggcatgggcaccagcctggcctgcgatgtggacggcgtggagccgctgagcatcgtgatgaaactggtgcgggtgcacggcgagccagtggtgaaattctccgatgacccgatcaagaacgtctgcgaagacgcctcgtttttgcagtacgcagcacaagtgttcaacgttggcagtgtggaggtgtgacatgcaagaacgtatcgcacgggaactgaacatcaatcgcgcgttgacccaaggcggcgaacccgaggaaatccaacggcgcatcgacttcatcaagaccaccttgcgccactcaggctgcaaggccctggtattgggcatcagtggcggcgtcgactccctcaccgccggccgcctgtgccaattggcggcagagcaactgcgcagcgagggctacaccgcacgctttatcgccatgcgcctgccctacaagacccaggccgatgaacgtgacgcccaggcctccctggacttcatcaccccggaccacatcgacaccctcaacatcgccgccagcgtcgacggcctgatggccagcctggccgccgccgaagccagcgccgagcatgtcgatttcatcaagggcaacgtcaaggcccgcacgcgcatgatcgcgcaatacgccgtggccaacctgcacaatggcctggtggtgggcaccgaccacggcgccgaagcgttgatggggttcttcaccaagttcggcgacggcgcctgcgacctggccccgttgtcgggcctgaccaagacccaggtgcgattgctcgccacggccctcggcgccccggccaatctggtgcacaaacacccgacggccgacctggaagaactggtgccgggcaagctggatgagcatgcctacggttgcacctacgcagagatcgacgcctacctgatgggcgaaccggtgagcgagcgggtgaggacgattgtcgagggggcgtacagcaagacagcgcacaaacgtgcgctgcctatcagtccggcttgagttgacgatcagattttgacgttttcgcggatgttccagccgaaccgaatcggcccgccatcctttccgccatcggccttctggggctgatagctgacttcgatcctggcgaagttaaggctgatttcctctgtcagtaggtcatgggttgtcgctgcgcgcgtgtcgtaggaggcgaccatgacttccttcaaggtgatcaccaggtattccacgctgttatcgcccccagccttgcgtaccacgatgcgcgcttcgggataatgcttgccggttgcgcaggccatcatcaggttgggcgaggatttatccagtgacttttcaatcgcgatattggccatatccaccttgccggcaccaccgcctgtaccactgtgcatcgagcctgactgagtcatcctccagccccagcgggaaatatcgatttcatcgcgatgcgcctggtccctggactcgcccttgatgtcccccagcttcaaaaacatatcggttgccatgtccgctccttgtcttgtcatccgccggtagtggcgcggggcgtacttttccgattccgacgattgaccgcaagacgctaaggcgagaacgggaagtgcctgtctacaaaaaggaaactttccgacattcttgccggatattgattctttacgctctgcgctcttgtgaattcaggagtcaaggaatggcgaccagtgtattgagggacggcttccccagtgcccacctcgcgacgcgtgaacgggtggaaagcagcattgatctacgccggttgtttgcggctatcgacgccgatccggcgattgccggggcgggggtggtgtatctcgattccactctgtggccggtgacgttgcgtgagtttcaaccgatttgcagcgtgttgcccaagcgggtgatcttgcgggaaatgccggcttcgatggcaaggttggattttgtgcgcaggttggagcatgagccacgggagtcggagcttgtattcgaggcgcttgggatgggattggcgtgtgggagtgtggttttaggttggattgtcgcggtcagtggcaccgttgccattccattttcggctggcgccagttcagtgattgccgctgttggttatacctctgctgcagcaagtttcgttcaatgtgtcgttgggggataccgtgtgtacaacgagctcaccgagccttcgaataacgaatcattggacagtgatcgctggtaccaacacgtaaccgctgcattggacgcagtcgcactggtgggtgcaagtacctcgttcctaacaaccctgagattggttaaagcaacgaaggtgagtaccggaaagaattggcagcaggtattgagggggcttacccgacaagagcgagcgaagctgacgaaggagttactgagtatccagcatccacatctatcttcgaaaatgttgaggttaaggcagctggaaggacatttacctaagcgactgacaccagcacagttgcgccacgcgacagtaactcaaattaaagatgttctaggtgcatcaatgactgtgatgggcagtgctgtatccggcaatcttcacacaattgccgtaggcctccatgaggagtttgaagaatgatctttctgatgacgcctgaggaattttggtgtttcctgaaacgttactttccggttcttatgggggcgctttttgctcaaggctttgccgttgcaatcggcgtaccgatgatctttgacggttactttcatggattacctattgccgacaatctcaaatattcctttttttcagttctcggtttggcttttcttattgcccactgcaatttcatggtcgtgcgtggctatccaggttggttatggatcccggtgatcctgatggtattaagtctgttcggtgttttaccaacagtcgaataccaccctcacaaggtgttctatgtgctaggccttttattcccgctgatggctctgttgctgctcaatagtaaacgtcaccgagaagctcgagctgaatgggtaaaacttcgtcaaaagcgtcagcgtatcgcgaagataatccgtacccagcgtcaacgagttaggcgccgggcaggattatgaaggcctaccgctcgatcgaccgactccaccgcgcattccactccggccgtgcctggttgacctggtcccaatcgatcgaaatcgccgtctgcaagtaaccctgcatcgcttcgacccgcgcacgggtcttgtcggtggtcggcgtagtcgggttcgaggggatctggtcgccttcttccagcgcaggggcctgggcttcggcggtcagcaggaaggccgcaagtttctgcgccagttccggctggtcattgcgcgcaatcacgcattcggccacgttcagcaccaccgcgccttccttgggctgcgcgtattccatgggcacgccgagcagtttctgggtggcgacctgggttggggtgagggggaagatcgcggcttcgtcggtctgcaccatctcggagattttcgccgagctggcgatgtattccagcacgttggggccgacggtctttggccaggccttgaagccgggttccacgttggtttcgtcgccgccctggatgcggttgaacatcaggaaaccgtgcaggccgaaggtggacgacgccagggactggaacaccactttctccttgaagcgcgggtcggccaggtccatccatgaagtgggcgcggcccagcctttttccttgaacattttcgcgttgtagcccagaccggttacgccgagggtcacggctacggcttcgtccttgatcttcgccttggccgggatctgctccagggtcgggctcggcgccagcttgtcgcacaagcccatggagatcgcgcggtacatgatgccgtcgtcgaggaacatcacgtgcatctgtgggttgtctttgttggcctggaccttggcgaggatgtccgacgaggtgccgggcacgatcaccaccttgacgttattcgctttttcgaacgcgggcagcaccttgtcggcgtacacccgttccatggtgccgccgttcatgcccaggtacagcgtgggcgcggcgtgcgccgttgaggcgagcagggcgagggacaagcaggacagcgcgatacgtgggttcatggatgtttttcctctcaggcttggaaacgacggatggaaaacgcttcgatggggtggcggctggccccgctgcagacgatctctgccagggcttcaccgaccgcgggaccgagctggaacccggcgccggcaaagccgaaaccgtggagcaagccgggttgggtgctgctggggccgatcaccggttcgtgatcgggaaggtaaccttcggtgccgctccaggtacggatggcctgggcgcccttgagaaaggggtagagttcgccggcgttgcgcaggatctccagcaccgccgcctgccctgggcgcgcggtcagcgggccgagggcaaagccgcgaccaccgccgaggatgcaattgcccctagcgacctgccgcgcataaatcccgccaccttcaacgccggtgctcacgttcatcaccaccggcaagggctcggtgaccagcatcgccggatgcgccgaggtgatcggcaccgcttcgccaaactgcgcggcgacgcttccggcccaggcgccggcgcagttgagcagccatggcgcttgcaggtgcaggccgttggcgcagttcacctggaaccggcggctgtcatgttcgatgcggatcacctcggcctgctcgtacacgacggcgccataacgctgtgcggcacgggcgaaggcaggagacaccaggcgcgggttggcatgtccgtcttccgggcacagcgaggcgcccacggcaatatcgccgacccaggggaagcgtgcgcgcaattcggcgtagtccagcaactgcaggcccaggccaaagccacgggtctgctcggcgtacgcctgcaacgcggcgaaatcggcatgactgcgcgccagcttcaaatgcccggagcgcacgtattcgccgtcgatgccgatcaaccctggcaagtcggcccacagttgatgggcgcgctgggacaatggcagttggtgcaagggccgaccctggcgccgcacgccgccatagttgacgccactggaatgcgagccgcaaaaatcccgctccaccaaggccacgtgctggcctttctgcgcgagcatcaaggccgccgaggcgccgacaatgccgccgccgaggacgatcacgtcgatcatggctgcacctccacgccaaacggcagcggcttgatcggtgcctggccgcgcaggcggcccacgtgttcaatggcgcggccgctgcgttcggcgacaatctccgccgccgccagcccacacatccggccctggcagcggcccatgccgacgcgacagtgggccttgacccggttgagctcccagtggccttcatccaccaccgcgcgtatctcgccggcgctgacttcttcgcaacggcacaccattaacgcgtccggcgcctgggccgcccattgctcggggaaggggaacgcggtttccaacccatgacgaaaacgctggatgcgcgccagttgctgctccaatacggcggggcggcgctgatcaatcgccacgccagaatcttccagcaccgccaatgccgcacgttcaccggccatttgcgcggcgtccgcacccatgatgccggccccatcgccggccaggtacacaccgtcgacgctgctgcgcccggcgttgtcccgttgcggcaaccaggcacggttcaaggtgttccaggcgaactcacagccgagcaagtccgccagttgggtctcgctgcgcaacgcgtgggcgaaagccacggcgtcgcattccagacggtgttcaccccaacgaatgccgctgactcgctgttctccgtcgatcttctgcagcgtggcgccctgatgcacggcaatcccatgggcgctcagccaggcgcggtaatacaggcccttggccaaggtcagtggttgcccgagtagcgccggcagcgcacggcactgtgcactgaacggcgcgctgtcgagtaccgccaccaccttggccccggccttggcatattggtaggcgaccagatacagcaacggcccgctgccgcagaacgccacgcgctcaccgatggcgcagccctggtatttcaaggcgatctgcgccgcgcccaggctgtacacgccgggcagggtccagcccggcaccggcaggatacggtcggtggcgccggtcgcgacaatgatcctggtgtattcgacgctctcggcccggccgttgttgagcatgtccaggcgaccgtcctcggcattccacaccagggtttgcggtcgatagtcgatcagcggcgccagctcatctatcgtgcggtgcacggcttgggccttgctcgcttcaaatccgtagatctgcctggcggtgcgctggaagcccaggggttgccgccgatagatctgcccgccgccgcgcaggctttcatcgatcaggcacggtgtgatgccatggtcgagcagggtgcgcgccgcgctgatcccggccgggcctgcgcccacaatcaccaccggcttcatggctggcgccccgggtcacggctgatcgcctggccttcttccagcagcgtcgagcaggcgcgcacgcggcggccgtcctcaagccgcacccagcagtcctggcaggcgcccatcaggcagaaaccggcgcggcgctcggcgctgaagtcactgccgcgcaggtgttcggcgcaggtcagcacggcggtgagcaaggtatcgccaagcaagccgctggcgggttgaccgtccagggtaaaggacagggcagggcggccggtctcggccacacgtttgaacaaggccatcaatgtttccccaccagcacgcggtccaggccgtagacccggtccagcagaatcatggtggccgccgtcaacgcaatcaccagcgccgacaccgccgccatcatcgggtcgatggactcggtggcgtacacatacacgcgcaccggcagggtttgcgtggccggcgagctgacgaagatcgacagcgtcacttcatcgaaactgttgatgaacgctagcaaccagccgccggcgacaccgggcagaatcatcggcagggtgatctggcgaaacagcgtaaagcggccggcccccagggattcggcggcctgctcggcactgcgatcaataccgatggcggccgccagcaccaggcgcagcacatagggtgtgatgatgactacgtgcgcgagcatcagccaggtgaagctgccgttgacgcccatcaatgcgaacaagcgcagcatcgccacgcccagcaccaggtgcgggatgatgatcggcgacaggaacaacgcgctgaagaagttgcgccccgggaacgtgtaccgactgatcgccaacgccgccggcaccgcaatcaacgtggccaggctggctgcggtgaaggccaggaccaggctgttgtagaacgcctggataaagtcggcccgctcgaacaccgcgcgaaaccagcgcagcgagaagcccgaagtgggcaggctcaaggtgttttccggggtgaacgccaccaggcacaccaccaccagcggcgccatcatgaacagcaccaccaagccgtggaaaccgagggccaaaggaccgtttctggacatgcgcttaaacccccagggactttttatagcggccttcgaccatgcggttccagctcagcatgatcagcagattgaccaacagcagcaccaccgcgatggtcgcgcccatgggccagttgagttccgagaggtactggtcgtacaccacggtggcgaccattttcaggcggcgcccgccaagcaggccggggatcgcaaaggagctcgcggccaggccgaacacgatcagggtgccggacagcacgccgggcatgacctgcggcagcacgatcttgcgcatcaccgtggcctggctggcgcccagcgacaatgcggcctgttccgccgacgggtcgagcttctgtagggaggtccacaccgggatgatcatgaacggcagcatcacgtgcaccagcgcgatgatcaccgcgaacggcgtgtacagcagcttcaccgggcgcccgccgagcagttggatcagttggttcaccaggccatccgcgcccaatagcaggctccagccgaaggcgcgcaccaccaccgaaatcagcagcggcgtgaggatcaggatcaggaagatcgagcgccacggcgtgcccatgcggctgaggatgtaggcctcgggcacaccgatcaccacacacagcagggtcaccagcgcgctgatccagaaggtgcgccagaagatctcgtagaagtacgagtcgctgaacaatgacaggtaatgggccaaggtccattcatcggccttcacgcccacctggtagtcgaacacgttgaacgacagcaccagggtcaggcccagcggcaaaaccagcagcccggcaaacagcaccagcgccggcagcgacagcaggtaaccgcgactcatgcgtgcacctcgtcggctgccagtacgcgcagcaagtccgcatgccagtccaggcccactgccgcgccgcagcccagcggtgcgctgccatcgttgctgcgcaccacggtgatctcgccgaggtcggtgtggatgtggtacagccattggctaccaaagaagtaacgatcgagcaccttgccttgcaggcgaccggcacccgcgtccaccagcgtgatcttttccgggcgcaggctcaggaccagctcgccgtcgccgcgttcatgccgtacttgcggtatccccaactgatcgtaatcgccagccagcaggttggccttgccgacgaagtccgagatgaagcgcgtgcgtgggtgttcgtagagcttgtacggcgcgtcgatctgggtcacgcgcccggcctgcatcaccaccacacggtcgctgatggacagcgcttcagcctggtcgtgggtgaccatcaaggtggtgatgccgacggcgcactggatgcggcggatctcgaactgcatctcttcgcgaaggttggcgtcgaggttggacagcggctcatcgagcagcaacaccggcggttcgatcaccaacgcacgggccagggccacgcgctggcgctggccgccggacagttcccgggggtagcgctcggcatgctgggccaggcgcaccagttccagcacagttttcaccttgctggcgatctcggcggccggcaccttgcgcatcttcaggccgaaggcgacgttgtcgcgcacgctcatgtgggggaacagcgcatagctctggaacaccacgcccaggccacggctggcgggcttggcgtgggttatgtcgcgcccatcgagcaggatctgcccgccgctcacgtcaacgaagccggcgatcatttgcagggtggtggtcttgccgcagcccgaggggccgagcagggaaacgaactcgcctttttccaccgccaggtcggtggcgaccaccgcgtcgacggcgccgtagcgtttgctcaaggcgttgagttggagaaatgccatgtctgcgttccaccttttttgagtcgcgtcgaaacgcgcttttttgttttgggcagatgcgaatgagctgttgccggtgcgttggcgctcgatcttgagtcggctgccggttgttgttcatttcgcccctgtggacgcagattaggacgaagactaggatgggcggaagatggaatttcactgaacggactattattttcagatttattcactcaccggaatttaccaagagattgagtgttatggattccactgatcgaaatcaaagccgcaaagaagtcggggcgggcggggtgtctcgtctattcgcgctgttgcgcaccctgggtgacgtgccggagggcggcgaacgcgtcacccagctggcgcaacaggtgggtctgtcgcaacccaccacccatcggctgttgcgcagcttgatggacgaaggcatggtcgagcaggacgcccgcagcaagcgctatcgcctgagcctggagttcttcgccctggcggcaaacgcgagcaagaccggcaacctgcgcgacctggtgcgcccgagcatgctgcgcctgagtgcgtcattgggtgactcgctgttcctgctggcgcgcagcggcttcgatgcgatctgcctggaccgcagcgaaggcccgtacccgatccgcaccttcaccggcgatatcggcgggcgcgtggcattgggtgtggggcagggcagcctggcgatcctggcctttctgccggaggaagagcgcgaaaccgtgatccgctacaacctgccacggctcaaggacttccacctgtatgacgaagtgctgttgcgctcggaagtggagaacgtgcgtaacctggggtatgcggcgcgcaataccggggtgctggaaggcatggccgggttggccgtacccatcctcaatcgggatgggcacgcggtggcggcgttgagtgtggcgaccatcagcgatcgcctggggccgggccggttgccgatggtggtggagttgctcaagcgcgaagcggcggcgatcgggccacggatcaatccgtttgatccgacgttgcgcaggccctcacaaacctttggcggataacccatttcagccacgatgaagatcaaaaagtctgagcgggctggctcgcgagtgaggtgggtcagcccttgtttgtcggcgcagtgggattaatcatcgtttccggccttacccgttgttcgtactcttcggcgctgatcaagcccaattgcacggccgcctccttgggtgacaagccctcgtccgcggccttgcgggtgatctgggccacgcggtcataacccagcagcgggttgagcaccgtcgccatcagcaatgaatgctccacgttgtgtgccaactgcgggcggttcacctccaggccgctcagcagcttgtgggtgaacaggtcgacgccgtcggtgagcacgtcgatcgattgcagcaggttatggatcagcaccggcttggccacgttcaattcgaaggtgctcgaagcgcccgccagagtgatcgtggtgtggttgcccatcacctgcatcgccgcctgcaccagtacttcggcaatggtcgggttgcgtttgccgggcatgatcgaggaggtcaggccatcgtccggcacgatcaattcacccaggccgcagcgcggacccgaaccgagcaggcggatgtcattggcgatcttggtcaatgacacggccagcacattcagcgcgccagaggcttcgaccagggcatcgtgggtgcccatgccttcgaatttgcacgggttggtttcgaagggttcgccggtgagccggctgatttcctcgcagaacgccacgtcaaaaccgacaggtgtattcaacccagtgcccaccgccgtgccgccttggggcagcaggcaaaggcgcggcatgcacgcttcgatgcgcgcgataccgtgctggatctgctgggcaaacgcgccaaatgcctggccctggctcatgggcaccgcatccatcaggtgggtgcgaccgattttcagcacgtcctgccaggcgtctgccttggcgttgagtccatcacgcagatggcccaatgcaggcagcaggcgaccgcgcagttccagcacggtggtcaggtgcatcaccgtggggaaactgtcgttggacgactgcgagcggttcacatggtcattgggatgtaccggcgacttgctgcccagttcaccgcctagcgcgaggttggcgcggttggcaatcacttcgttggcgttcatgttggtctgggtgccggagccggtttgccagatcgacagcggaaagtgcaggtcgagctcgccgttggccagttcgtccgcggcctgttcgactgcctgcgccagggccggtgccagcgcgccgaggcgtgcgttggcacgggcacacgcgcgtttctggtggccgaaggcgcggatcaggctggcggggaacggctgtttgccgccgaacacctccagtgcccgctgggtttgtgcgccccagtagcggtcggctggtatggacaccgggccgaacgcgtcgtgttcgattcgctgagtagtcatcaggagcctcgttaaagcgcagcgccggcggcacggccgagcacgcgttgatattcaccctgggcggtctgctgggagaactcgccggaccatttcgataccaccaccgtggccacgctattgccgatggtgttgcaggtggcaatcgccatggacatgaagcggtacacgccgaacagcagcgccaggccttcggccggcagtacgccgatggcggtcacggtcgcggcgaacaccacaaagctgccacccgacaccgccgccgcgcccttggaggtcaccaacatgatcgcaatgatgcccagttgttgttcccagctcagcggcacaccgtaggcgttggcgatgaacagcacgcacagcgacatgtagatcgatgtgccgtcgaggttgaacgcatacccggtaggcagtaccagaccgacgctctgcttggagcagccgaatttctcgagcttttgcagcaggcgcggcagggcgctttccgacgaggcggtgccgagcacgatgaagatttcatccttgatataggtgaggaagcgccacaggctgaagccgctcaaccggcacacggcgcccagcaccacaaagatgaagaaggcgatgccgacgtagaacatcaacaccaggttggccagggacatcagcaccgctgtgccattgctgcccaccgcgtatgccaccgaaccgaaggcacccaggggcgcgaatttcatgatcaggttgatgaactcgaagaagcattcagagatacggttcaggccgtcctcgatcacttcccggcgctcgggcttcagggccagcagggcgaagccgaacagcaccgagatcaccagcacttgcagcaactggccgccagcgaaggcaccgacaaaattgtccgggaagatgccgtagataaagtccatggtcgaggcgggcgcatgccccttggctacggcggcactcgcggcggcggcagcggcgctgctcgggtgggcgtcatgcatgccggagccgatctgcagcaggttgccccacaacaggccgatggccagggcgatggtcgacaccacttcgaagtaaatcagcgcgcgcaggccgaccttgccgacccgcttgatatcaccggccgaggcgatgccgtggaccactgtgaaaaacaccagcggcgcgacggcggtcttgatcagcttgaggaagatatcgccgaggatcttgaaactggcggccagctccggagcaagaaagccgaaggcaatgccgaggaacatggcggcgacgacctggaacgtcaggtccttgtagagcggttttttggcgggggtggatgacatgtctgtgatctcattgttgttatggttcggatgacgctctgtgggagggggcttacccccgatagcagggtgtcagccacctgatttttcccggatacaccgctatcgggagcaagccccctcccacagttggacctccattggttttcaggtcagcgggggaccgcgccctggcgcgccagcgcgatatccaccatctgcggcgccagccccagatagttggcggggtcggtcaggcgttgcagttcggccacatccaattgcgcagtggcttcgccctgggcgagcagggcgtcgagcaggctggtgccctggtcgttggccatgcggcacgcggcgtacaccacatcgtgggccacctggcgaccgagggccggggcgaggcccatcatcacggcttcggcgacgatcaggccctgggtcatgtcgaggttcctgcgcatgcgctcggggcgcacttccaggccggcgagcatgaaggtcgcctggccgagggacgcggcgctgagggcgaaagcttcggggatggcgatccactccgcctgccacgggccggtagagcgttcgaagtcctggatcatcgcgtcgagcatcagcccggcgtgttggcgcacgcccttggcggcggcatacatcagctcgcaggaaatcgggttgcgcttctgcggcatggtgctgctggcgccacggcccttgacgaagggctcgtacacttcgcccagttcgctggtcatcatcatcatgatgtccagggcgatcttgcccagggagccggtgaccaggccgaggaagttcaaggtctcggccagcccatcacgggccacatgccaggtggcttgcggcacgcccaggccgagttcggccatcaaggcttcctgcacctgcaaccctttgtcgcccagggaagcgagggtgccggccgcgccggcgaattgaccgatttcgacccgtggacgcaactccaccaggcgctcggcgtggcgatcaaacatgctcagccacaccgcgcacttgtagccgaaggtgatcggcagtgcgtgctgcaagtgggtgcgacccgccatcggcgtgtcgcgatagcgcgcggcgaggccagcgagcaggccgcgcacggtctggatatcacgctcgacgatggccagcgcagcgcgtatttgcaggaccacggcagtgtccatgatgtcctgggtagtggcgccccagtgcacgtagcggccggcttcaccgcagatgttcgacagttgctccaccagcggcaggatcgggtaaccgactatctcggtctcgtgctgcatcagcgccaggtccagggcttcgtaccgcgacagcgcggcgatctgctcggcggcgtcgccggggatcaccccgcaccgcgcttcggcgcgggccagggcgacttccacttcgatgtaacgctcgatcagtgctttatcagagaacacgccgcgcatttcggcggtgccgaacatgtcgcggaacagggcggaatcaaaaacggtactcgacatgggcaaatcctaattgttatttttaaatcatacatatttaatatgtccgtacaatatgattgcgcctgtgctgatacactgtcaactcgactgcgagggtaaaaatggaaagtgtgagccagaggcgttatgcggcggtggccaaggacctgatcgatcagattggcaatggccattacccggtagggtcgttattgccgactgaattcgaactctgttctctgtacgcagtgagtcgccacaccgtgcgcgcggccatcgaccagttgcaggggcagggcatggtctcgcggcgcaagcgtgtgggcacgcgggtcgaagccgcttcgccccagggcgggtattcccaggcgatggcctcggtggccgacctggtgcaggtcgctgaaacccatatccgggatatccaaggcgtacgcgaattcgtcgtcgatatcgcccaggcccggcgcctgggactggagccgggtgggcattatttctgtgtgtcgagcatcaaggtcgatgccagcgccggcaatgcgccgctgtgctggaccgacgtgtacgccgaacaggcctttgccgaagtgatccccgaagcgcgcaagcacccggatgaactgatcgccgcgctgatcggcaaggcgttctcgcggtctatcgatgtggtggaccagcaagtgcggccggtgcagttgtcgaccgaactggcggccagcctcaaggcacagggcggggcgctggggctgaatatcatccgccagtatcgtgatgaaaatggcgggctgattgcggtgtcggagacggtctatccagcggaccgtttcaccctgaccatgcagatgaagcgcgacaagctctgatccatacgacgataaccttgcatctggtaaaactttggctaatatgacccgggtaaaacatatatcacccgggtaataaatatgcctacgcgcacacttcctgcttgtaccgcctttatccgccaccagcgtgtggcggcaggttcctatacggacgtcgccaagacgctcgccgagcttgaccagcccacgggcagcttcctggtcttcgacgatgccaccggtaaccaggtcgattttccctggcccgcaggctatgcgcccgaactaccaacccaggtcgacgtgaccgacgagcctcccactccccccttggtcggacgcccgaaactgggggtggtcgcgcgggaagtcacgctgttgccgcgtcattgggaatggctgggccagcaacgcggcggtgcttcggcggcgttgcggcggctggtggatgaagcgcgcactgcccatgcttctcgtgaccggatacgccaggccaaggaagccggctatcggttcatgagtgccgtcggcggtgacctgcccggttttgaagacgcctcgcgcgcgttatttgcctttgatgcggcggacttttcccgcaagatcgcgcactggcctgtagacgtgcagacctacctggcctggctgtcgcgcgacgcgttccctgtctgacaacaactcctggattcgaacctcatggacgtcacccagcaacggccgttgtggcagatctacctgatctttctggcaccgatggtgctgtccaacttcctgcaaagtttttccggcaccctcaacggtatctatgtcgggcagatgcttggcacccaggcgctggcggcggtgtcggggatgtttcccatcgtgttcttttttattgctctggtgatcggcctgggggccggcgcctcggtactgatcgggcaggcgtggggcgcgcaggaaaccgcgctggtcaaggtgatcactggcgccaccctgacgctgggcgcgttggtgggggtgatcgcagcagtactcggtagtctgtttgcacgcccggcgttgcaggcgctcggcacgccggtggatgtgctcgacgatgccgtgggctatgcgcagatgatgatgttgatcatgccgctgctgctggtctttattctctatacccaattgctgcgtggcgtcagcgacacgatctcgccattgctcgcgctgatggtctctaccctggtcggcctgctgctgacaccggcgctgatccgtggctggatcggcctgccgcccctgggtatccagagcgcggtctacgccgggttggtgggtaatgctgcggcgatgctgtttttgatcctgcgcctgcggcataagcatcatgtgatggcgccggatcgcgaactactggcggccctgcgcctggatcgggtcattctcggcaaggtcctgcgcatcggcttgcccacgggcttgcagatggtggtgttgtcgctgtcggaattggtcatcctcgctctggtcaatggccacggttcccaggccaccgcggcctatggcgcggtcacgcagatcgtcaactacgtgcaattcccggcgctgtcgattgccatcaccgcatcgatcctcggcgcgcaggcgattggtgccggccgcctggagcgcatcgggccgatcctgcgcaccgggctgctgatcaacacctgcctcaccggtgggctgatcgtgctcggctacctgctgtcccactggctgctcggcttgttcatcaccgatgacgcggcgcgggccaatgccgagcacctgctgcacattatgttgtggagcatcctggtgttcggtttccaggcggtggtgggcgggatcatgcgcgccagcggcgtggtgttcatgccggtggcgatctcgatcttctgcgtgctctgcgtggaactgccgatggcgtacgtgctcaacgcccacttcggcctggaaggggtgtggatggcgtttccggtgacctacctggccatgctggcgttgcagactgtgtattaccggctggtgtggcgacacaagcagatcaagcggttggtgtaaggctcaggccgcgcagcaacagttccaggctctgcaagccttgctccagccgctcgtccgggtgttcaccccgggcgatccacaaagcggtgttgagcaagcttccattgatcaactgcgccagtgcgtggctcggggcagggtggataacaccggtttgcatcaacgcctccaggcgttcgcgcagcgattcgacacagtgttgctgagagccggtgtcgcccagaacggctggcgcgtcctgcaacacaatgcgctggatctcactgtcttgagccatgcgcaagtaggtgcggcaacgttcgcaaaaaccgacccaggggtcggtggcctcagcggttatgcgctgcaggcgcgcatccatctcgctgtcgagctgggccaccacggccgccaacaagcccttcttgtcaccaaaatggtggtacaacgcaccccgggtcagaccggcgcgggcggtgaaatcgtccattgaggtattggcgtacccttgggctgcgaaagcttcgcgggcgctggcgatcagcctggcgcgggtgtcttcgatcatttcagcacgggctcggctcatgggtagggctcgcaatgggcaagtgatagattgacatacgctgcgtatgttacgcatgatttgtcacatacgcaccgtatgtattttgcctcgaacagtgcagatagcaagttccggggctttcagaaagaggtcacgcaggatggcaaacccttacgccgaattgttccaggtccctggcgcccgggcttttgtactggcggggatgctggcgcgcatgccggtctcgatgacggggatcggcttgatcaccatgctctcgcaggtgcacggcggttacggcctggcgggctcggtggcggcggtatttgccctggccacggcgttttgcgcgccgcaggtatccaggctggtggaccgctacagccaagggcgggtgttgccgattgccgcgtcgatcggcggcggggcgttgttgatgttgctgctgtgcacccacttgcaggcaccgaactggacgttgttcctgttcgctgccctggccggttgcatgcctaacatgtcggccatggtgcgggcgcgctggaccgagttgtaccgcggccagcccaagttgcagaccgcatttgccctggagtcggtgctggatgaggtgtgctttatcatcggcccgccgatctcggtgggtctgtgcgtggtgctgttcccggaagccgggccgctggtggccgcgttgttgctggcggtgggcgtcaccacctttgtgttgcagcgcgagaccgagccaccggtgcacgcgcatcaggggcatcacggtcgctggctgatcgcctcgccctcggtgctgatcctgatgatcctgctgctggccatgggcgtgatcgtcggcgtggtagatgtggtcagcgtcgcctttgcccagcatcagggccagccggcggctgcgagcatcgtactgtcggtctacgccatcggttcgtgcctggcggggctggcgttcggcaccctcaagctcaaggcgccgttgccccggcagttcctgttgtgcggcatcgccacggcgttgaccactttgccgttgctgctggtgaccaacatcgcagggctggcggtggcggtctttgtctccgggctgttctttgcccccaccctgattgtgtccatggccttggtggaacaggtcgtgcccgccagtcgactgaccgaaggcatgacctggctgatcaccggcctcagcatcggcgtggccatcggtgcggcgagctccgggtggatgatcgaccactttggcgccaccagcgggttctgggtggcgctggcggcgggagcggtcgtgttgggggcagcggtgttggggtatcggcggctaggatgatcagttgatcgcagggcaagcgtctgcgcagtgatgctgcagaaactcgttcaacgcttggcgggtcaggtcattgagcgtgacctttttgcgggttgccgccagcgccgccgccaggtgcaggtcatggccgacccggacattgaaggaacctttgcaaggtttctctggtgcatgccccagggtctggcaggtggcgaggtaatcatccaccgcctcacgaaaggccgtatccagttcggcgacggttttcccttcgtagctcaccagcgccttgatgaacaagaccttgccgaacaggcagttgtcttcgaggctggcttcgatggagccgatgtagccgttgtgtttcagttggttgttcactgaatcagctctcctgatttcaattgttcgatgatctggcgccgaatgtagtgtttcagttcgttgccagggtgaggcttgtgcaaggtgatcattgcactggggtcgccgatgtcgaacttgacgcggcttccagccccttcaatctgtgtgtagcccagccgacgcagcagcgtgacgagctcgggccaggtaaatgtcatttgctcgttgagaaatttggcgagcagcttttcatttttggacacggcgttccctgcgtgtaactaaatgtagttgcaaaaagtggtgttcgtcaatgctagctcgtgttcgggtggtcttcccgagattgatgtaacccttgatgacaccgtgcgccgcgcctgccatccccgctaatttttccctgtccggttcgttttatagggacgacgtgcctttgtgcttcctgcctactgctccggactccaagaaatgaatgctgaagactccttgaaacttgctcgccggtttatcgggttgcccctggaaaaacgccaattgttcctgcaggccctgcagaaagaaggcgtggatttttcccggttcccgattccggcaggggtggaggcgcaggatcgccaggcgttgtcctacgcgcagcagcgcatgtggtttctctggcaattggacccggccagcggcgcctataacctgccgggagcggtgcgactcaagggggcgttgagcctcggcgcgctggagcaggcgttcgccagcctggtcacgcgccacgaaaccctgcgcacagtgttccagcgccaggcggacgagcgcctgttgcaagtgccggcagatacctggttgaccgtcgagcacctggacctgagtcacctggccgccgccgcgcgcgaacaggccgtcaatgaggccgcgacccgtcaatccctgctggcgttcgacctggaaaacggtccgctgctgcgcgtgcaattgctcaagctcgacgcgcaggaacacgtgctgctgctgaccctgcaccacatcgtctccgacggctggtcgatgaacgtgctgatcgacgagttcatccgctgctatgacgcccacgagcgcaatgaagccccgcaactgccggccttgccgatccagtacagcgactacgccctgtggcagcgccgttggctggaagccggggagcaggcgcgccaactggattactggcaagcgcgcctgggcgatgaacacccggtcctggagctgcccaccgaccgcccgcgcccggccatgccgagctaccagggcacgcgccacaacttcgcgattgaacctgcgctggccacacagctgcgtagttgcgcgcaaaaacacaacgtcaccctgttcatgctgttgttcggtgctttcaatgtgttgctgcatcgctacaccgggcagggcgatatccgcgtcggcgtgccgatcgccaaccgcaaccgcactgaagtcgaagggttgatcggcttcttcgtcaacacccaggtcttgcgtaccgagctgaccgggcaaacccgcatcaatgagctgctgcaaggcatcaaggaacacgcactgggcgcccaggcccatcaggagttgccgttcgagcgcctggtggaagctctcaaggtcgagcgcagcctgagccatacgccgctgttccaggtgatgtacaaccaccagccggtggtggccgacattaccagtgtcagcaccgcctccggcctggaactggcattggtggagtggcaaggccgcaccacccagttcgacctgaccctcgacacctatgaaaaatccggcaccctgcatgccgcgttgacctacgccaacgacctgttcgacgcgccaaccatcgagcgcatggccgggcattggctcagcctgttgcaggccatggtggtcgacggtgagcagcgcatcggcgagctgccgatgttggctgcggatgagcagcaggtgctggtccacgggtggaaccagacgactgaggcgtacccgaccgagcgcggcattcatcacctgatcgaagaccaggcgcaggcaacgccggatgcgccggcgctggtgttcggtgcgaccacgctgacctacgcccagctcgatgcccgtgccaaccaactggcccacgccttgcgcgagcagggcgtcggccctgacgcgctggtggggatctgcgtcgagcgctccatcgagatggtggtcggcctgctcgccattctcaaggccggcggcgcctatgtcccgctggaccctgagtaccctcgggaacgcctggcctacatgatcgaagacagcggcatccagttgctgctcagccagcgcgccctgttgccactgctgccgaccgcgggcatccaggtgattgccctggaccagcccgcgagctggctcgacggttatagccgccagtcgccaagcgttgacctgcaggcgctgaacctggcctacgtgatctacacctcgggctcaacgggcaagcccaaaggtgccggcaacagccaccgtgcgttggtcaaccgtttgtgctggatgcagcaggcctacggcctggacgccagcgatgcggtgctgcagaaaaccccattcagtttcgacgtgtcggtgtgggagttcttctggccgctgatgaccggcgcccgcctggtggttgccgcgcccggtgaacaccgcgaaccggcgcgcctgatcgagaccatcgggcaacaccgcatcaccaccttgcacttcgtgccgtcgatgctgcaggcgtttatccatgaaccgggcgtgcaagcctgcaacagcctgcgacgcatcgtctgcagcggcgaagccttgccgctggatgcgcagttgcaagtgttcgccaagttgccacagacgggtctgttcaacctctacggcccgaccgaagccgccatcgacgtgacgcactggacctgcgtcgacgaaggcgccgacagcgtgcccatcggccggcccatcgccaatctcgctacgtacgtgctcgatgcccagctcaacccggtgcctgctgtggtcagcggtgagctgtacctgggcggcgccggcctggcgcgcagttaccaccggcgcccggcgctgaccgccgagcgttttgtgccgagcccgttcggtgacggtgcgcgcctgtatcgcaccggcgaccgcgtgcgccagcgtgccgatggggtgatcgaatacctcggtcgcctcgatcatcaggtcaagctgcgcggcctgcgtatcgagctgggcgaaatcgagacgcgcctgatgcagcacccctcggtgcgtgaagccgtggtgctggtgcaaggcggcaagcaactggtggcctacctggtgctggaagaccaggcgccggccgacctcaaggcctggctgctcgacagcctgccggaatacatggtgccgacccatatagtgcacctggccaggctgccagtgaccgccaacggcaagctcgaccgcaaggccttgccgttgcccgacgccgcgcctcagcaggcgtatgtcgccccggaaagcgacttgcaaaaagccctggcagtgatctggagcgatgtgctcggcgtggagcaagtcggtctggaagacaacttttttgagctgggcggtgattcgatcatctccatccaggtggtcagccgtgcgcgccaggcgggcattcgcctgagcccgcgggacctgttccagtaccagagcgtgcgcagcctggcgctggtggcgaccttcgagcaggcgcccctcatcgatcagggaccggtcaccggcgaggtgctcctcacgcctgtgcaacacagctttttcgagcaggcgattcctgcgcgccagcactggaaccagtcgttgctgctgaccccgcgagagacgctggagcccgtgcgccttgacgccgccttgacccgcttgatcaaccaccacgatgccctgcgcctgcgttttgtgcagcaggcggatagttggcggcaggctcatgccgagccggttgcgagcgcttcgttatggcagtcccaggtcgccggcgaggctgagttggccgcactgtgcgatgaggctcaacgcagcctcgatcttgaacagggcccgttgctgcgtgcggtcctggcaagcatggccgacggcacccagcgcctgttgctggtggtgcatcacctggcagtggacggcgtatcgtggcgtatcctgctcgaagacctgcaacaggcctacggcaacgccgcgttgccggccaagaccagcgcctatcggcagtgggcgcagcaattgcaggcccacgcgcagacgctggacgcgcaactggcgtactggcaggcacagaccgcaagcgccgacctgccgtgcgacaacccccagggcagcctgcaaaaccgcctgggcagcaccctcgaaatccgcctcagcgccgatcacacccgccaactgttgcaagacgccccggcggcctaccgcacccaggtcaatgacctgctgctgaccgccttggcgcgcgtcatcagccgctggagcgagcagcccgccgcgctgatccaactggagggccatggtcgcgaagacctgttcgacacgctcgaccttagccgcaccgtgggttggtttaccagcctgttcccggtgcgcctgcaagccgaaggcgagctgtcggcggcgatcaagtcggtgaaggagcaactgcgtgcggtgccgcataaaggcattggctacggcctgctgcgctacctcggtgcgcctgacgtgcgtgagaccttgtcgaccctggctgcaccgcgcatcaccttcaactaccttggccagttcgaccgccagttcaacgaagcagcgctgtttgttccggcgacccagggcagcgggcaggcccaggattgcgaggcgccgctggccaactggctgacggtggaagggcaggtgtacggcggtgagctggccctgcggtgggggttcagtcgcgagatgttcgaggtggcgactgtccaacgcctggcggatgactatgacgctgaactccaggccctgatcgaacactgctgcgccacgccggcggggcaggtcacgccttcggacttccccctggcgcgcctgacccagcagcaactggatgccttgcccatcgccgggccggcgatggctgatctctacccgttgtcgccgatgcagcagggtatgttgttccacaccctctatgagcccgaggccgaggcttacatcaaccagttgcgcctggatatcgacggcctggacctgctggcgttcggccgtgcctggcaagccgcgctggaccggcatgacatcctgcgcagcagcttccactggcttggcctggacagcgcgcatcaagtgatccagcgccgagtcgatgtgcagttgcacgtgatcgaagacatcgacgccgattgcgatgcgctcgccgctgccgagcgcgagaaaggtttcgcgctgaatgccgcgccgctgtttcgcctgatgctggtacgcggtgccggtaaggcctggcacctgatcttcaccagccaccacatccttatggacggctggagtaacgcccagttgctcggcgaggtcatcgctcattacgccgggcacagcgtgccggcgccgctggggcagttccgcgattacctgggctggctgcaccagcaagcgtcgggcgaggcgttctggaaggctgccctggcgccgctgcaagcgccaaccctgcttgcgcaggcgctgcgtgtgccggtcgaaggcaagggcatggctgaccatcaggtggtgctgggtgacgacttcacgcgtgccctgagtgagtttgcccgccgccataaagtcaccctcaacaccgtgctccaaggcgcatggagcgtgctgctgcaacgctataccgggcaggactgcgtggcctttggagccacggtggcggggcgctcggcaccgttgccggggatcgagcaacaactgggcctgtttatcaacacgctgcccatcatcagcgcggcctcgccagcgctgtcggtggctggctggctgagcgagctgcaagccctcaacctgagcctgcgcgaccacgaacatgtgccgctctacgacatccagggctgggcggggcagcagggcgctgcgctgtttgacaccttgctggtgttcgaaaacttcccggtggccgaagccttgaaacaaggcgcacccgccggcctgacgttcggccgcctgcataaccatgaacagacccactacccgctgaccctggggatcgaattgggcgccagcctgcgcctggagttcggctacgaccaggcccgtttcagcgctcaacaggtcgctcgattgggaggcaacctgcaccacctgctggtgcagatgctcgcagacgcgcaagcaccgctgggcaacctgcgcctgatggaccccgccacacgccgcgacgttctcgcccatagccgggcgaccggtgccgtcccgcgccaactgcgcgtgcatgaacgcatcgccgcccaggccgccgccacgcctgacgcgctggccgtgcaggcgggtgacgcacacctgagctacgcccagctcaatgctcgcgccaaccggcttgcccatcgcctgctggaactgggcgttggcccaggccagcgcgtcggcctggcggcacgacgtggcccgcagttgatcgtcagcctgctggcggtgctcaaaagcggcgccgcctatgtgccgctggacccgaactatccggccgaacgcctggcctacatgctgacagacagccggctcgacctgctgctcagcgaaaccgggctgctggccgacctgccgttgccccaagggctggcgcgtgagagtttcaccgcgtccggagaagaactggcaggctacccgtcgaccaatccaaccaaccatgccgccgctgccgacctggcctatgtgatctacacctcgggctccaccgggctgcccaagggtgtagccatcgaccatgccgccctcggccagttctgcgacagcgccgaggtctacagcggcttgagcgcggcagaccgggtgctgcaatttgccacgttcagcttcgacggctttgtcgagcaatgctacccgccgctgtgtgtgggcgcggcgctgatcatgcgtggcgacgaattgtgggacgcagggcaactggcgcggcacatcgtcgagcagggggtgaccctggcggacctgccggcggcctactggtatttgctggccaaggaatgtgccgtcgaccagcgcaccctgggcaacctgcgtcaggtgcatgtcggcggcgaggcgatgtcggtggaagggttgcgtgcgtggcacgccgccggcctgtgcgacgtgcgcctggtcaacacctacgggccgaccgaagcgactgtggtgtccagcgtgcacacttgccagttggcggacgccagtgatgcgtttggcgtgccgattggccgggccatcgacggtcgctccttgtatgtgctggacagtggtttcgaattgctcgccaccgagggtgtgggcgagttgtgcatcggcgccgaacacggtttggcccaacgttacttcgaccgcccggcgctgaccgccgagcgcttcctgccggacccgttttccgccgtgcccggcgcacggctttaccgcagtggcgacctggcgcgctataaccaggcgggtgcgttggagtatgtcgggcgcatcgatcatcaagtgaagatccgcgggttccgcgtggaaatgggtgagatcgaagccagcctgcaagctttgccgcagctgcgtgaagccgcggtcatcgcgcaatccagcgcgacgggcacgcagttggtggcgtacgtggttgccgccaacgggcagaccgtggacgctcaggcattggcggccaccttgcgccagtccctgccggattacatggtgccggggcactgggtcgtcctcgacgccttgccgttgaacaacaatggcaagcttgaccgtcgcgcactgccggcaccggacctgaaccaggcgcgccaagcctacctggcgccgcgaaccgcgctgcaaacgcgcttggccgccatctggcaagcggtgttgcaggtcgagcaagtggggctcaatgaccacttcttcgaacgtggcggccactcgttgctggcgacccaggtgatctcccgggtgcgccatgacctgcaactggaagtaccgctgagggcattgttcgaacaaccgacgctggaggcgttcgccgatgtttgcgcagggttgcaggcgaacactgcgctaccgctggtggcagtgacgcgcgaccagccgctggcactgtcgttcgcccaggaacgccaatggttcctctggcaactggacccgaccagcgcggcctaccatgtgccgagcgcgctgcacctgcgtggccgattggatgtcgcggcgctggaacaggcgttccaggccctggtgcaacgccatgagccgttgcgcaccacctttgtggaagagggcgagcacacttggcaacggattcacccgcaccttgcgctgccgatcgaacaccaacaggtcgaggcctgggcgatcgagcctgccgtggcgcaggagatccaacgcccgttcgacttggtcaatggcccgctgatgcgcgtcaaattgcttcaaatcgaggccgagcaccatgtactggtgatcacccagcaccacatcatctccgacggttggtcgatgcaggtgatggtcgatgagctggtggcgctgtatcagggccgggccgaactgccaacgcagctcatccagtacgccgactatgcccagtggcaacgtgattggatggcagccggtgagcaacaacgccaactcgactactggcgcctgcgcctgggcagcgagcatgccgtgctggaactacccctggaccacccacgcccggccgtgcaaagccatcgcggtgcacgccgccaggtgcacctggacagcgcgttggtcgccgggctcaaggccctggcccagcgtcaggacgtaaccttgttcgtgctgctgctggcgtcgttccagaccctgctgcatcgctacagtggtcaatcccagatccgggtcggcgtgcccattgccaaccgcaatcgcctggaaaccgagcgcctggtcggcttcttcgttaatacccaggtgctgcaggccgatgtgcacgggcagatggcgttcgaccaattgctcgtccaggtcaagcagcgcgccctcgaggcccaggcccatcaggacctgccgttcgagcaactggtgcaagccctgcaaccggagcgcagcctcagccataacccactgttccaggtgatgttcaatcaccaggaccgcctgcgcgccgcgccgctgcagttgcctggcctggacctgcaagcggtggattgggcagggcacagcactcagttcgacttgaatctcgagactgaggagtccgctgctggcctatgggcctctctgacctacgccaccgacctgttcgacgccgctaccctggatcgcctggccgagcattggcaaaacctgatgcacgcggtggtgcaggatgcgtcccaaaccattgatgaactgacgatgctcagcgtgccgcaatggcagcagatggtcgaaacgtggaacgacagcgctgtcgactacccccgcgaacgctgcgtgcaccaattgttcgaagcccaggccgtggcacagccgcaagcccttgcggtgcaattcaatggccaagccctgaactacggcgaactcaaccgccgcgccaaccgcctggcccatcgcctgatcgcggcgggtgtggggccggacgtattggtggcggtgcatgtcgagcgctccctggacatggtggtcggcctgctggcgacgctcaaggccggtggcgcttatgtgccattggacccgcaattcccggcggatcgcctggctttcatgctcgacgacagccgcgcacaggtcctgctgacccagccacacttgatcggtcacctggcgcacccgcagggtgtgcaggtattgatggtcgacgccgccgacgctgccgagcacaacccgcaggtcgaggtcacgccggaacacctggcctatgtgatctatacctctggttccaccggcaagcccaagggtgtgatggtacgccaccgggcgctgtgcagctttacctgcggcatggccgataccctggacatcggcattgacgcacggatgttgtcactgaccaccttctcgttcgacatcttcgccctggagctgtacgtcccgttgaccgtcggcgccaccgtattgctgagcggccaggaactggccctcgacccggaagcgatcatcgacctggtccacagccaatcggccaacgtgctgcaagccacgccgtcaacctggcgcatgctgctggaaagcccacgctcccagctgctgcacggtatcaagagcctgtgcggcggcgaagcgctgccggcggacctggcccagcgcatgctcgacctgcaaggcccgctgtggaacctttatggtcccaccgagaccaccatctggtcggcggcccatcgtctgcatgacgcacaaccatttgtcgggcggcctatcgccaacaccacgttgtttatcctcaatgccgggttgacaccgagcccggtgggcgctgccggtgaactgctgatcggcggtgtcggcctggcccgtggttaccacgagcgccccgcgctgacggccgagcgctttgtgcccaacccgtatggtgcgccaggagaacgcctgtaccgcactggcgacctggcccgctaccgtgccgatggcgtggtggaatacatcggccgcgtcgaccatcaggtcaaggtgcgtggcttccgcatcgaactcggtgaaatcgaagcctgcctgcgcgagcatgccggcgtgcgcgaggccgtggtcctggccgataacgaccgcttgatcgcttacctggtcagctcggtacccgacacggtagaagcctacaaggcggccctgcgcgagcgcctgccggactacatggtgccggcgcacctggtgttcctcgacagcctgcccctgacccccaacggcaagctcgaccgtaaggctttgcctgcggtggacgcggcacagttgagcaatggccatgtggcgccagtgacactgcgtgagcagcaggtcgcggcgatctgggccgaggtgctggagctgccgcaggtcggccttgacgatcacttcttcgagctcggcgggcattcgctgctggccacccgtgttgtctcgcgggttcgccaggtgctggcactggaagtggcactcaagaccctgttcgaacacccgcggttggaggatttcgttcaggcgctgggcgaggagggcgtggttgcacccgcgttgctcaaggctgaccgcaatcaaccgctgccgttgtcctatgcccaggagcgccaatggttcctctggcaactggacccgcaaagcacggcgtatcacatccccagcgcattacgtttgaaagggctgctcgacctgcctgctctgcaatgcagtttcgacaccttgctggcacgccatgaaagcctgcgcacccatgtgcgccaggacgctggcggcgcggtacaggtgattgaagactcgggcctgatcgagatcagcctgcttgacaccgaggaagatggcctgaaagcgcgggtcgcagaagtggttgcgcagccattcgacctgctgcgcgggccgctgttgcgggcccagttgctgcgcctggctgttgatgaccacgtactggtgctggtgcagcaccacatcgtctccgatggctggtcgatgcaattgatggtcgaggaactggtgcagttgtacgccaccttcaaccagggccggatgcccgacttgccagccttgccgatccagtacgccgattacgccctgtggcagcgcaactggatggaagccggtgagaaggcccgtcaactggcgtactggcaggctcagctgggtggcgtacagccggtgctggagctgcctttcgactacttgcgcccggcagtacaaagccagcgtggcgcgcgcctgggcattgagttgcaacctctgctgctgagcggtctgcgtcagttggcgcagagcgtcggagtcaccttgccgatggtactgctggcgtcctaccaggcgctgctgcaccgctacagcggccaggaagacgtgcgcgtcggcgtgccgattgccaaccgcaatcgcctggaaaccgaagggctgatcggcttcttcgtcaacacccaggtgctcaaggctgatatccatgggcagatgagtgtggtgcaactgttgcggcaggtgcgccagcgttccctggaagcacaggcccatcaggacctgccgttcgagcaactggtcgaagccttgcagcccgagcgcagcatgagcctgagcccgctgttccaagtgctgttcaaccatcgcgtgacctcggccgccaatcatttgcagcggctcgccgaactggatgtcgaggtgctgagctgggatgaaggtgtggcgcagttcgacctggcgctggatgtggaggaaagccaggcgacgctgcgtgcgtccctgagttatgccaccgacctgttcgccccggcgaccatcgaacgaatggccggccactggcagaacctgttgcaggcgatggtcgccgatcaacagcaacccatcagccaactgaacctgttgggcgaggacgagcgacagcacatcctgcaattgtggaacgagaccgacgcgggcttctcggccgagcgtctggttcaccaattggtggccgaccgcgcccgggaaaacccggatgcagtcgccgttaaattcgacgcgcaaaccctgacctacggtgaactggacagccaggccaaccgcctggcccatgcgctgatcgcccgtggcgtcggcccggaagtgcgcgtggcgattgccatgccgcgcagtgccgaaatcatggtggcgttcctggcggtgatgaaggccggtggcgtttatgtgccgctggacgtggaatacccgcgtgatcgcctgctgtacatgatgcaggacagccgtgcccagttgctgctgagccacagcagtgccttgcagcaactgccgattccagatggcctggacagcctggcgattgatcgcaccgaggagtgggtaggcttcagcgacactgaccctcaagtgaagctggacggtgacaacctggcctacgtgatctacacctccggctccaccggcctgcccaagggcgtggcggtatcccacggtccactggtagcccatatcatcgccaccggcgagcgttatgaaacctcgcccgccgattgcgaactgcacttcatgtcgttcgccttcgacggctcccatgaaggctggatgcacccgctgatcaacggcgccagtgtgttgatccgcgatgacaacttgtggctgccggaatacacctaccagcaaatgcaccgccacaacgtgaccatggcggtgttcccaccggtttatctgcaacagttggccgaacatgccgagcgtgacggcaacccgccgaaggttcgtgtgtactgcttcggtggtgatgccgtagcccaagccagctacgacctggcctggcgcgcactcaagccgacctatctgttcaacggctacggcccgacggaaacggtggtcacgccattgctgtggaaagcgcgcaagggcgacccatgcggcgcggtctacgccccgattggcacattgctgggcaatcgcaatggctacgtgctggactcgcaactcaacctgcaacccatcggcgtagccggcgagttgtacctgggcggcgagggtgtggcgcggggttacctggaacgcccggcactgactgccgaacgcttcgtgccggacccgttcggcaaacccggcagccgtgcctaccgcagcggcgacctgacccgtggccgcccggatggcgtggtggattacctggggcgtgtcgaccatcaggtgaagatccgaggtttccgtatcgagctgggcgaaatcgaagcacgcctgcgagagcaggacaacgtcggcgaaaccgtggtggtggcccaggacggtccgaccggcaagcagttggtggcttatgtagtgcccgcagacggcagcctgattaacgaaaccgagttgcgcgacaccctgcgtcgcgccctgaagacccgcctgccggactacatggtgccgacgcatttcatgttcctggcacagatgccgctgacccccaacggcaagctcgaccgcaagggcctgcccgagccggatgcgagcctgttgcagcaggcctatgtggctcccgaaaccgagcttgagcagcagatcgccgtgatctgggccgatgtgctgcgcctgccgcaagtgggcctgaacgacaacttcttcgaggtcggcggccattccctgttggcgatccagatcacctcgcgggtccaggccgagctgggcctggaagtgccgctggtggaagtgttccagaccgaaacgctgcgtgcctacgtgcaggccgccgccaccttccgcgccggcagcgcggaagattttgatgatcttcgtgactttttgagcgaactagaggcgatttgacccatgctttccaaccctaatatcgatctggtttcgcgctttcttcgcttgcctctggaacagcgccagcagttttacctgcgcctgcaaagccggggcatgagcttcgctcaattgccaatcgcgtcgatccgcgaggacggccagcacctgccgctgtcctacgcccaggaacgccagtggtttctctggcagttggacccggacagcgacgcctaccacgtccccggcgccctgcgtctgagcggccagctggacaaggctgccctgcaacgcagtttcgacacgctggtggcccgccacgcaagcctgcgcacgcgcctgcacctgaacggtgagcagcgtgcccaggaagtactggagcatggggtgatcgagatcgccgagcatgccgtcgacgaaacacagctcaaggcatgggtcgaggccgagatcgccggtccgttcgacctgcagcacggcccgttgctgcgggtcagcttgctcgccgtgagcgaagcggaacacgtgctggtgctggtgcagcaccatatcgtctccgatggctggtcgatgggcgtgatggtgcaggagttgatgcagctctatgccgcctacagccagggccaggactgcgcgttggcgccgttgccgatccagtacgccgactatgccctgtggcagcgcagttggatggaggcgggggagaaggcgcgccaactggaatattggcgtgaattgctcagcggcacgcaaccggtactggaattgccgttcgaccagccgcgccccgcgcaacagagcttccgcggggcgcgccaggacatcacgctggagccggcactggtcgccgggttgaaggcgctggcccagcgggaaggcgtgacgatgttcatgctgctgttggcctcgttccaggcatttttgttccgctacagcggccagccggatattcgtgtcggtgtgccgattgccaaccgcaaccgcgtcgagaccgaatcgctgattggctttttcgtcaacacccaggtgctcaaggccgacctcgatggccagataagctttgcccaattgctgcaacacaccaagcgccgcgcgctggaagcccaggcccatcaggacttgccctttgaacagttggtagaagcgctgcaaccggagcgcagcctgagccataacccgctgttccaggtgatgttcaaccatcaggcccattctccggccgtggcacagcagctaccggggctgcgcgtggccaacctggaatgggacagtcacagtgcccagttcgacctgagcctggacacccaggagagcggcgacgggatctgggcgtccctgacctacgccaccgacctgttcggcgccgccaccgtagcgcgtatggccgagcactggctgagcctgctgcgtgccgccgtggcagacaccgcgttgccgttgcaggacctggcgaccctcaacgcccaagagcgcgagcagatcctcgtcgagtggaacgccaccgagcgcgactacccgcaagggcagtgggtgcatcagttgatcgaagcccaggcgctggcgcagccggatgcgccggcgttgcgcttcaacgatatcgccctgagttatgccgaactcaaccgccgtgccaaccgcctggcgcatcgcctgatcgaagctggggtaggtccggacgtgctggtgggcctggcggtagaacgctccatcgacatggtggtgggcttgctcgcggtgctcaaggctggtggtgcctatgtgccgctggaccctgagtacccgcgtgagcgcctggcctacatgctggacgacagtggcgtgaaactgctgctgacccaggcgcatttgcgtgaacagttgccgattcctcaggggctggaaaccctggtgctgggcgagtctgtattcgagcactacagcgacgccaacccaggcatcacgctggacggcgaaaacctcgcctacgtgatctatacctcgggctccaccggtcaaccgaaaggggcgggcaaccgtcattcggcgttgctcaaccgcctgcaatggatgcaggaagcctatggcctggaggtcagcgatacggtgctgcaaaagacgccgttcagcttcgacgtatcggtgtgggagttcttctggcctttgatgaccggtgcgcgcctggtggtggcagcgccgggggatcatcgggatccggccaggctgatcaacctgatcaatcagcagcaggtcaccacgctgcactttgtgccgtcgatgctgcaggcgttccttcaggacccggcggtgtccacctgccaaagcctgcaacgcatcgtgtgcagcggcgaagccttgccggtggatgcccagcagcaagtcttcgccaagctgccgcaagccgggctctacaacctgtacggcccgaccgaggctgccatcgacgtgacccactggacctgcgtcgacgaaggccgtgacgccgtaccgattggccgtccgattgccaaccttggttgctacatcctcgacagcaatttcgaaccggtgccggtcggcgtgctcggcgagctgtacttgggcggcatcggcctggcccgtggttaccaccgtcgtccttccctgactgccgagcgttttatcgcgcatccgtttgtcaaaggcgaacgcctgtaccgtaccggagacctggcgcgttatcgcgcagacggcgtgatcgaatacgccgggcgcatcgaccaccaagtcaagctgcgcggtctgcgtatcgaactgggtgaaatcgaagcgcgcctgctggaacacgaatgggtccgcgaaaccgccgtgctggcggtggagggcaaatgcctggtgggctacctggtgctgcaaaacgccggcgatgactggcgcgatgtgctggccgcccacttgggccagcacctgccggactacatggtcccggcccaatgggtgctgctggaacagatgccgctgagccccaacggcaagctggaccgcaaggccctgcccaagcccgcatccacccagcactacgaagcgccgcagagtgcgctggagcagcagatcgcagcgatctgggccgaggtgctcggcgtcgagcaagtcggcttgaacgacaacttctttgagcgcggcggtgactcgatcatctccattcaagtggtcagccgtgcccgtgccgccggtatccacttcaccgccaaggcgctgttccagcaccagacggtgcgcagcctggcccgcgtggcgcaattacagaccgcgcaagtgatcgaccagggcccggtgcagggcgcgactccgttgctgccgttccagcaactgttcttcgagatggacttgccggaccgccatcactggaaccagtccttgctgctgacgccgcgccagccgctgcttgccgagccactggagacggcgttgcaggcactcacccagcaccacgatgtgctgcgcctgagcttcaccccacaggccgaaggctggaccgcacgccacgacgcgccagctgccaccctgctttggcaggccagcgtggaggatgcggccgaactgcatgccctgtgcgagcgcgcccagcgcagcctcgacctgcaacaaggccaactgctgcgtgcagtgctcgccgagatggccgacggttcccagcgcctgttgctagtcatgcatcatctggtagtggacggcgtgtcctggcgcgtgttcctcgaggacctgcaaagcctgtatcgccagcggcgcttgccggccaagacttcgtcgttcaaagcctgggccgagcgtttgcaggcccatgcccgcagcgaagcggtcgcgccggaaaaagccttctggcggcaacagctccagggcgtgtcgaccgacttgccctgccgcgatccgcagggcgcgcgtcccgggcgcctggcccagaccgtggtcagccaactggatgccgagcgcacccggcaactgctgcaacaggcgcccacggcctaccgcacccaaatcaacgacctgctgctgaccgccctggcacgtgtcatctgccagtggaccgggcaggcttcgagcctgatccaactggaaggccatggccgcgaagacctgttcgacgacatcgacctgactcgcaccctgggctggttcaccagcctgttcccggtgcgccttaccccggccgactccctggcgacctcgatcaagcagatcaaggaacaactgcgcgccgtgccggacaagggcctgggcttcggtgcgctgcgctacctgggcgacgacgccacgcgccaggtgttcggccagttgccggtgccgcgcattaccttcaactacctgggccagatcgatggcagctttgatcagccggacgctttgttcgtaccggcggcggagagcaccggtgccgagcagagcccggaggcaccgctgggtaactggttgacgttgaacggccaggtatacggcggcgagctgcacatgggctggaccttcagcccgctgatgttcgaccctgcgcagatcgaagccttgagccaggcgtttacccgtgaactgactgcattggtcgagcattgctgcgcgcctggcaaccacggcgtgaccgtctctgacttcccgttgtcgcgcctcacccagccgcagctggaatccctgccgctggccgccgatgccatcgaagacctctacaccctgtcgcccatgcagcagggcatgctgttccacaccctctacgagcaagcagccggcgactacatcaaccagatccgcgtgaccgccgagggcctggatgtggcgcggttccagcaggcctgggacgccacggtgcaagcccatgacgtgttgcgcagcggcttcttctgggaaggccagctggaatggccgtgccaggtggtgtaccgcgaagcccgactgccgattgaacacctcgactggcgcgccatgccagaacgcgaactggaattgcacaacctgcagcaagcccagcgccgccagggctttgacctggccaaggcgccgctggtgcgcctggtactggtacgcaccgacgagcaacgccatgagctgatctacacgaaccatcacatcctgatggacggctggagcaactcgcgcctgttcggcgaagtgctgcaacgctacgctggcgtggcggtgccgccagcggcggggcgctatcgcgactacatcggctggttgcagcagcgtgatgccgctgccaccgaaaccttctggcgcgaacagttgggcacgctgcaagcacccactcgcctgggcagcagccagccgctggcggcagacgggcacggcgagcacccactgagcctggatcgcgctcagactgaacgtctcgaggcctttgcacgccacaacaaagtgacgctcaacacgcttatccaggccgcatggctgatcctgttgcagcgccatagcgggcagtcggtggtggccttcggcgccacggtggccgggcgcccggcggagcttgtgggggtggagcagcagatcgggctgttcatcaacaccttgccagtgatcagcgccgtagatgaccagcagagcgtggcggcctggttgcaagcggtacaggaccgcaacctggccctgcgcgagcatgaacacaccgggctgtacgacattcagcgctgggccgggcagggcggtgaagccctgttcgacaatatcctggtgttcgagaactacccggtgtccaaggccctggaacaaaacggtggcagcggtatccgttttggcctgccggaatcccgcgaacagaccaacttcccgctgacggtgctggtggacgtcggcgatacgttgtcggtgcagttcagctttgcgcgtgcgcatttcgatgcaagcacggtacacacctatggacgtcacctggtcaatctgctgcacgccatgcttgagggtggccagcaacgtctgggcgacctggcgatgctcgatacggctgaacgtcagcaggtgcttcaggattggaacgccacggcgcgggactacccgttgcagcagggcgtgcatcagttgatcgaagaacaggtggcgcgcacgccgcatgccgcggcgctggtgtttgccgggcagcgcttgagctatatcgaactgaaccgtcgcgccaaccgcttggcccatcgcctgatggaagccggggtaggcccggacgtgctggtgggcctggccgtggagcgctccattgaaatggtggtgggcctgctggcggtgctcaaggccggtggcgcctatgtgccgctcgacccggaatacccgcgtgagcgcctggcctacatgctggacgacagtggcgtgaaactgctgctgactcaggcgcacttgcgtgaacagttgccgatccctcaggggctggaaaccctggtgctgggtgagtcgacctttgaagcctacagcgacgccaacccaggcatcgcgctggatggcgaaaacctcgcctacgtgatctacacctcgggttccaccggccaacccaaaggcgccggtaaccggcattcagccctggccaaccgtctgcactggatgcaggaagcctatgggctggaggtcagcgataccgtgctgcaaaagaccccgttcagcttcgacgtatcggtgtgggagttcttctggccgctgatgaccggcgcgcgcctggtggtggcagcgccgggcgatcaccgcgatccggccaggctgatcaacctgatcaatcaagagcaggtcaccacgctgcactttgtaccgtcgatgctgcaggcgttcctgcaagacccgaaggtcgcaacctgccacaccttgcatcgcattgtttgcagcggtgaagccttgccggtggatgcccagcagcaagtcttcgccaagctgccgcaagccgggctctacaacttgtacggcccgaccgaagccgccatcgacgtgacccattggacctgcgtcgatgaaggccgcgatgccgtgccgattggacgcccgattgccaacctcggatgctacctcctcgacagcaacttcgagccggtgccggtgggtgtgttgggcgagctgtacctcggtgggattggtctggcccgtggttaccaccgccgcccggcgctgaccgccgaacgttttgtcgcccatcccttcatcaagggcgagcgcctgtaccgcaccggtgacctggcccgctatcgccctgacggcgtgatcgaatacgccgggcgcatcgaccatcaggtcaaactgcgcggcctgcgcatcgagctgggtgaaatcgaagcgcgcctgctggaacacgattgggtccgtgaaaccgccgtactggcggtggacggcaagcacttggtgggctacctggtgttgcaagacgccggcgacgattggcgcgatgtgctgagcgctcacctggcgcaacagctgccggactacatggtgccggcccagtggatgctgctggagcagatgcccctgagccccaacggcaagctggaccgcaaagcgctgccgaaggtcgacgccaacctgcaagcccgcgaatacctggccccgcacagcgaactggaacaacagattgccgcgatctgggccgaggtgctggacgttgagcgtgtggggctaaacgacaacttcttcgaactgggcgggcattccctgctggccacccaggtggtggtgcgcctgcgcgagcaattgcacgcggagttcgacgtcaaatcgatcttcaccaccccgaccctggccgatttcagtgcctatgtggcggcccggcagacaaataattcgccggtgcaggacgcattggctaaatccttggaggccctcaaacgtctatcagcagaagatttggataaattgatttcctgaggggcgtggcgtgcaagcattaatcgagtcggtagggtcactttcggcgcaacagaagaaagcgttggcggtaatgctcaagcagcaaggcatcaacctgtttgagatagccccggttttcaagcgtcaggacggtgagcctcttcgactctcttatgcccaggagcggcaatggtttctgtggcaactggagccgcagagcaccgcttatcacgtgcccagggccctgcgcctgagcgggcccttggacgtggccgcattgcagcgcagctttgacacgctgatgatgcgtcatgaaagcctgcgcacgcatttgcaggaggacggcgacagtgccttgcaggtgattgccgagcaggcgcgggtgcagatcgccgtggtcgacgcccgggagtcgcagctcaaggacctggtggaagcgcaaattgcccagccgtttgacttgcagcaaggcccgctgttgcgagtcaagctgctgcgcctggcgcctgaggaacatgtgctggtgctggtccagcatcacatcgtgtctgatggctggtcgatgcaggtgatggtcgacgagctggtccagctctacgcggcccatgtgcagggccaggacctgcaattgccggccttgccgattcaatatgccgactatgcgctgtggcaacgcagctggatggaggcgggggagcgtgaacgccaactgggctactggaccggcatgctcggtggcgagcaaccggtactggaaatgccgatggaccgaccgcgaccggcggtgcagagctaccggggtgcacggctcgacctgacgctcgaagcgtcgctggtggcgggcctcaagcgcctggcgcagcgcgaaggcgtgacggtgttcatgttgttgctggcgtcgttccaggccgtgttgcatcgctacagcggccagggtgatatccgcatcggcgtgccggtggccaaccgtaaccgggtggaaaccgagcgcctgatcggctttttcgtcaatacgcagattctcaaggccgatatcgacggccagatgaccttccatgaactgctgcaacaaacccgccagcgctcggtagaagcccaggcgcatcaagacttgccctttgagcaactggtggaagcgctgcagccggaacgcagcctgagctacaacccgttgttccaggtgatgttcaaccaccagaccgatacccagcgcagcggcggcagcgtcaccggcctgcacgtgcaggggctggaatgggagagcaagaccgcgcagttcgacctcaacctcgacacccaggaatcggctgagggcatccaggcgtcgttgacctacgccactgacctgtttgacgcgccgggccttgagcgcttgctcgcgcactggcaccgtttgttgcaacaggtggtgcaggattgcaacgtccgcgtcggcgagctgccgttgctggacgatgcgcaatggcagcaactggtgcacacctggaacaacacgcatcaggtgttcccccaggatgtcggggtgcaccgcctgctggaagcccaggcacaggcccgtccggacgcgacagcgctggtctgcaacggccagtctttgagctacgcagaactgaacctgcgcgccaaccgcctggcccatcgcctgcgcgcggccggtgtcggcccggatgtgctggtggccgtggcgctggagcgttcggtggacatggtgctggccttgctggccacgctcaaggcgggcggcgcctatgtgccgctcgacccgcagtttccggccgaccgcctggcgttcatgctcgaagacagccgcgcacgtgtgctgttgaccgccggtgacctgcacgagcgcctgccgctggcagccgatcaacaggtgctgttcatcagtgaacaggaggacgcccgttacagcagtgacaacccgcaggtcgcgctgaccgatgagcacctggcgtatgtgatctacacctccggctccaccggcaagcccaagggtgtgatggtgcgccatggcgccctgagcagctttacccagggcatggccgacacgttgagcatcgacgccaaggcgcggttgctgtcgttgaccaccttctccttcgatattttcgcccttgaactttatgtccccctggcggtgggcggcacggtcgtggtggcggacaagcctgtttcccaggaccccgaagccatcctgagcctgctgcatgaacaggcgatcacggtcgtgcaagccacgccctcgacctggcgcatgctgctcgacagcgagcgccgtgccgtgctgcacgggatcaagtgcctgtgcggcggcgaagcgctgccggccgacctggccgagcgcatgctggcccagcagggcacggtgtggaacctgtacggcccgacggaaaccaccatctggtcggcggcccacccattggttgaaccgttgccgtttgtcggtcgcccaattgccaacacatcgctgtttatcctcaatgccgaactcgctccgacaccggtcggcgtcagcggcgaactgctgatcggcggtgtcggcctggcccggggttatcacggtcgtgctgcgctgaccgccgagcgcttcgtacccaacccctttgcacacaacggtgagcggctgtaccgcaccggcgacctggcgcgttatcgcgtggatggtgtggtcgagtacatcggccgcgtcgaccatcaggtcaaggtgcgcgggttccgtatcgagttgggggaaattgaggcgtgcctgcgtgagcagagcgctgtccgtgaagcggtggtggtggccgagaatgaccagctcctggcgtatctggtgacgcacgccgtgacatcggaaaccgatcagggcaccctgcgcgagacgttcaagaccgcgctgcgcgcggtgttgccggactatatggtgccggcgcatatgctgttcctggcgcgcctgccgttgacgcccaacggcaagctggaccgcaaggcgctgccgaagccggacgccagcctgctgcaaaaacgctatgtggcaccggtcggcgagaaggcgcaacaagtggccgcgatctgggccgaagtgttgggggtgccacaggttggccttgaagatcatttcttcgagctgggcggtcactccttgctggcgacacgtgtcgtgtcgcgggtacgccaggcattggcgatcgacgtagcgctcaagagcctgtttgaacaaccggttttgggggcgtttgtacaggcgctgggtgaaaagggcgccgatgttgcgcacattagcttggctgaccgcgaacaacccttgctgctttcctatgctcaagagcgccagtggttcctctggcagcttgaaccggacagtgcggcttatcacattccggccgcgttgcgcctggtgggtgcgctggatcgcaacgccctgcaaagggccttcgatactctggtgcagcgccatgaaacgctgcgtacggtgttttttgccgatacgcaccagactgtccagcgtgtgatcgagcaagtcgcgccggtcatcgactatcaagtgcttggctcgactgagccggcccggttgcaggcgatggtagaagacgaaatcgccaggccattcgacctgcagtccgggccattgctgcgcatcaagctgctgcaactgagcgaacgcgagcatgtgttggtcatggtgcagcaccatatcgtctcggatgcctggtcgatgcaagtgatggtcgatgagctggtgagcttgtatgcaggctacagccagggccttgagcccacccttgcaccgttgccgattcagtacgccgactatgcccagtggcagcgcagctggatggaggcgggtgaaaaggagcgccagctggcctactggcgtgcgcgcctgggagatgtgcaaccggtgctggagttgccgctggatcggccgcgtccggccatgcagaactatcagggggcacgcctggacctggtgctggagtcgtcggtggtcgagggcttgcgcgcccttgcacagcgcgaaggcgtgacgatgttcatgctgttgctagcgtccttccaggcactgttgtaccgctacaccggccagtcggacatccgcgttggcgtgccgatcgccaaccgcaaccgtctggaaaccgagcagttgatcggctttttcgtcaatacccaggtgctcaaggccgagattgacgggcacatgacctttgcccaactgctgcaacaggtcaaggaacaggcgctgggcgcgcaggcccaccaggacctgccattcgagcagttggtcgaagccttgcaacctgagcgcagcctgagccacaacccgttgttccaggtaatgttcaaccaccagtcggctgcgcaagcccatcgcgatggccagcaactacctggcctgcgtgtggaagggttgacgtgggacagtcacacggcgcatttcggcctgagcctggacaccgaagagtctggtgaggggctgctggcttcgctgacttacgccaccgcactgttcgacgcgagcaccctgcagcgcttcgccgcccattggcagaacttgctcaagcgtgtggcgggcaatgcccagcagtgtgtcgccgacttgccgatcctgggcagagatgaacaagcgcagatgctgtacgcgtggaacccgccgcaaccgtcgcgtgccgcccatggcagcgtgctgcaaaagttcgaacaacaggtggccagccagccccaggctatcgccttgatcatggatcagcggcgcatgacctacgccgacctcaacctgcgggccaaccgcttggcccatgcactgatcgagcagggcgtgggcgccgacagcctggtcggcgtggccgtggaccgttcgctggagatgatcgttgcgctgttggcggtgctcaaggccggtggcgcctatgtcccgctggacccgcaatacccccaggaccgcctgcaatgcatgatcgaagacagcggcctgcaactgttgctgacccagcagccgctgctggagcgcttgccgatcagccctggcctgacgttgatttgcctggaagagggtgcggactggctggccgagtacccgggcagcaatcctgagatacgggcgttccccgcgaacctggcgtacctgatgttcacctccggctccaccgggcggcccaagggcgtcggtatcgatcaggcctcactggcacggcatgtcgaggtgtttatcgagctgttcgaactgactgcggctgaccgtgtgttgcagttcggtacgttcaacttcgacgggtttgtcgaacagctgtatccggcgctgtgctgcggtgccgccgtggtggtgcgcggcggtgagttgtgggacagcgacaccttctatgcgcaactgatcgaacatgacatttcggtggttgacctgaccaccgcctattggcacctgatcgctcgtgactttgccgagcgcggtgtgcgcgattacggccgcctgcgccaggtgcatgccggtggtgaggcgatgccaccggaagggctggcctcctggcgtgatgccgggctgggccacgtgcgcctgctcaacacctacggccccaccgaagcgaccgtcacggtgaccgctctggattgcgccggttacgtggagggtcgcgagaccgttacgcagatgatgccgattggtcgcgtgctggacggccgtgcgatttacctgttggatgccggcctgaacccggtgcccgtgggcgtggcgggtgaattggtgatcggcgggccgctgctggcacggggttacttcaaccgcgccgcgctgaccgccgaacggtttatccccgaccccttcgacccgctcgggggagggcgtctgtaccgtaccggcgacctggcccgttaccgcgccgatggcgtgatcgagtatatcggtcgcatcgaccaccaggtcaaggtacgtggcttccgtatcgagctgggcgagatcgaatcgcgcctgctggcacaggacgacgtgcgcgaagcgttggtgatcgctgccgaccagcaactgatcgcctacctcgtcaccccattgacggaagccgagcagcctggcttgcgtgagcgtattcgtggcgtgttgcgcgatgagctaccggactacatggtgccggcacatttcatgtttctggagcgcctgccgctgagccccaacggcaagctggaccggcatgccctgccgcgcccggaagcgactcaggcgactgagcagtgggtggcccccatcagtgcgctggagcagcaggtcgcggcgatctgggcagatattctcggcgccgagcgtatcggtttgaacgaccatttctttgaactcggcgggcattcgttgctggccatgcaagtggcttcacgcctgcggcataacctggggatcgagttacccttgcgtgtgctgttcgaacaaccgcgcctgcaggggtttgtggccgcgctgcacaccgagggcaagcgcggcggttcgacggcgccggcgttggttcccgcgtctcgcgagctgccgttggtgttgtcctacgcccaggaacgccagtggttcctctggttgctcgaccccgagagcactgcctaccacgtgcccagcgctttgcgcctcaagggccgtttggacctgaacgcgctgcagcgcagtttcgatgcgttggtggcgcgccatgaaagcctgcgtacccatctgcatcagggcgatgagcagaccgtgcaggtgatcctgccgcaggcgcgtgtcgagattgcattgcgtcagagcgatgaagcgcaggtcaaggcgcaggtcgaagccgagatcgcccggccgttcgacctgcaagcggggccgttgctgcgggctacgctgttgcgcctgagcgacgacgagcatgtgttggtgctggtccagcaccatatcgtctcggacggttggtcgatgcagatcatggtcgatgaactggtgcaactgtacagcgcctacagtcagggcctggaggtgcagttgccggccttgccgatccagtacgctgattacgcccgttggcagcgcgagtggatggacgccggcgagaaggaccggcaactgggctactggcaggcgttgctcggtggcgagcaaccggtgctcgaactgccgttcgaccaccagcgcccggctgagcaaagccatcgcggtgcgcgcctgtttgtagaattgccgccggccttggtcgccgacctcaaaggcctggcacagcgcgaaggcgtgacgatgttcatgctgttgctggcctcgttccaggcgttgatgcatcgctacagcggccaggaagacgtgcgcgtgggcgtgcctattgccaaccgcaaccgagttgaaaccgagcggttgctgggctttttcgtcaatacccaggtgctcaaggccgatatcgacgagcagacctcagtgctgcaactgttgcagcaggcccgccgccgtgcgctggaagcccaggaccatcaggatctgccgttcgagcaactggtggaggcactgcaacccgagcgcagcctgagcctcaacccgctgttccaggtgatgttcaaccatcaaaccgaagcacgtctgggcgcaaccgagcatcaactgtccaccttgcgtgtcgaaggcatggaatgggcaagccagaccgcgcacttcgacctggacctggacgtgcatgaaggcactgacggtatctgggccaccctgggttatgccaccgatctgttcaatgcctccaccatcgagcgcatggcgcggcattggcagaacctgctgcaagcgatggttgccgaccaacagcaacccatcagccaactgaacctgttgggcgaggacgagcgacggcacatcctgcagctgtggaaccagaccgatgccggcttctcggccgagcgcctggtgcacgagcgagtggccgaccgggcccgcgaaacccccgatgccgtggcagtgaagttcgacgcacagaccctgacctacggcgaactggacagccaggccaaccgcctggcccatgcgctgatcgcccgtggcgtcggcccggaagtgcgcgtggcgattgccatgccgcgcagtgccgaaatcatggtggcgttccttgctgtgatgaaagccggtggcgtctacgtgccgctggatatcgaatacccgcgagatcgcctgctgtacatgatgcaggacagccgtgcccagttgctgctgacccacaccagcgcgttgcaacaactgcctattcccgagggtctggacagcctggcgattgatcgcaccgaggaatggtccggttacagcgacacggcgcctgatgtgaaactggacggcgacaacctggcctacgtgatctacacctccggctccaccggcctgcccaagggcgtggcggtatcccacggtccgctggtggctcacatcatcgccaccggcgagcgttatgaaacctcgcccgccgattgcgaactacacttcatgtcgtttgccttcgacggctcccatgaaggctggatgcacccgttgatcaacggtgccagcgtgctgatccgcgatgacagcctgtggctgccggaatacacctaccagcaaatgcatcgccacaacgtgaccatggcggtgttcccgccggtttatctgcagcagttggccgagcatgccgagcgtgacggcaacccgccgaaggtgcgcgtgtactgcttcggtggcgatgccgtagcccaagccagctacgacctggcctggcgcgcactcaagccgacctatctgttcaacggctacggcccgacggaaacggtggtcacgccactgctgtggaaagcgcgcaagggcgacccatgcggcgcggtctacgccccgattggcacattgctgggcaatcgcaatggctacgtgctggactcgcaactcaacctgcaacctatcggcgtggctggcgagttgtacctgggcggcgaaggcgtggcccgtgggtatctggaacgtccggcactgaccgccgaacgcttcgtgccggacccgtttggcaaacctggcagccgtgcctaccgcagcggcgacctgacccgtggccgcccggatggcgtggtggattacctggggcgcgtcgaccatcaggtgaagatccgaggcttccgtatcgagctgggcgaaatcgaagcgcgtctgcgcgaacaggacaacgtcggtgaaaccgtcgtagtcgcccaggacggcccggccggcaagcagttggtagcttatgtggtgcccgcagatgccagcctggccaacgaagccgagttgcgcgaaaccttgcgccgcgccttgaaaacccgtctaccggactacatggtgccggcgtacttcatgttcctggcgcaaatgccgctgacccctaacggcaagctggaccgcaagggcctgccgcagccggacgccagcctgttgcaacaggcctacgtggcaccgcagagcgagttggaacaacaactcgcggcgatctgggccgacgtgctgcgcttgccgcaagtgggcctgaacgataacttcttcgagctgggcggtgattcaatcatctcaatccaggtggtgagccgtgcgcggcaggccggaatccgctttacgcccaaggacctgttccagcaccagaccgtacaaagcctggccggtgtggcacgccagggggacgacgggttgacgattgatcaggcggccttgagtggcgaaacgttgctgctgccgatccagcaggctttctttgccgatgagattgccgagcgtcaccactggaatcagtcggtggtgctcaaagcccatgagccccttgacgctggcctgcttacccaggccttgcaggcgctgatcgtgcatcacgatgcgctgcgttcccggtttgtcgagggcacggacggctggcagggtatgtatcgcgccgccgagcaccaccaggccgatgccgtgctgtggcaaagcgtgctgcacgatatcgaagagctggctgttttgggtgaggaggcgcaacgcagcctcgacctcgaccagggcccgttgatgcgtgcggtgctggttcaattgcacgatggtacgcaacgcttgctgctggttatccaccacctggtggtggatggcgtgtcatggcggatcctccttgaggacctgcaaacggcctatcgccaactcgccagtggcgccaaggtggcgttgcccgccaagaccagttcgacccgcgactgggcgcagcggcttcagcgatatgccaaaggcgacgcactgacccgggaactggcatggtggcaagcccaattgcacggcgccgaatctgacctgccgggcgccaatccgcaggcgagcttgagcaaccggcatgccggcagtgcgatcacgcacctggacgccgctcacacgcgccgcctgttgcaggatgcacctgccgcctaccgcacccagatcaacgacctgctgctgacggcgctggcgcgggtaatcgggcgctggaccggccacgattccaccctgatccgcctcgaaggccatggccgcgaagacctgttcgaggagatcgacctgacccgcacggtcggctggttcaccagcatttacccggtcaaactcacgccggctgcaaccctggctggctcattgaaggggatcaaggaacaactgcgcgccattcccgacaagggcatcggttttggtgccttgcgctacctgggccagcccgaggtacgcgatgcattggcagacttgccgcagccgcgcattaccttcaactacctgggccagttcgatgcgagttttgatagccctgaacacgaggggctgtttgcgccgtccggtgacgctgccggcaacgatcagagcccggacgcatcgctgggcaactggttggaaatcaatggccaggtgtacggcggcgagctgaacctgaactggggattcagccagcagatgttcgatcccgcttgcatccagcagttggccgatgactacgccgaagagctcaaggcgttgatcaagcactgctgccagcccggacaggccggcgccacgccgtcggacttcccgctggcgcgcttgaaccaggcgcagttggatggcttggggttgccgttgaaccaggtcgaagacctttacccgctgtcgccgatgcaacagggcatgctgttccaatcgctgtttggccagggctcgggcgactacatcaaccaaatgcgcgttgaggtgcaaggattggatgtggcgcgtttccgcgcagcctggcaggtcgcgctggagcaccacgatatcttgcggaccggtttcctctggcagaccgagttggagcagccgttgcaagtggtgtaccggacggcgcaggtgccgtttgtcgagcacgattggcagcagcgcgcagacagtggcgaggcgtttgacgcgttggcgcataccctgcgagccgatggttttgtgctggaacaggcgcccttgctgaacctgatggtggtccgtaccggtcccgacagccaccatttgatctacaccaaccaccatatcctgatggatggctggagtgcctcgcagctgttcggcgaggtgctgcaacagtatgccggcgagtcggtgcgcgcacccagtgggcgctaccgggattacatcggttggttgcaggcccaggacccgttcaccagcgagaccttctggaaagcccagttggccggtttgcaggagcccacgcgcctttcccgtggcatcacccatgagtcgggtgtgccccaggccaatggcgttcatcacctgacgctggagcagacggcgaccgaacagctcaaggctttcgcccagcgccacaaggtgaccctcaatacgctggtgcaaagcgcctggctcttgctgttgcaacggcataccggccttgacacggtcgcgttcggcgccacggtcgcggggcgtccggccgagttggcgggtatcgagcagcaggtcgggttgttcatcaacacgctaccggtggtggccactccaagcccgcagttgagcgtcgacgcttggttgcagcaagtgcaggaacaaaacctgcgcctgcgtgaacaggagcacacgccgctgttcgagatccagcgttgggccgggcttggtggcgaggcgttgttcgacagcatcctggtgttcgagaactacccggtgtccgaagcgctggagcagggctcgccggcgggcctgcggttcggtgcgatggacagcctggaacagacccactatccactgaccgtgctgctgggcatcggtgacagcctggcggtggagttcaactacgctcacgccgccttcgacgcacaggacatcgtgcacctggcggaacatttccagcaattgctgcaagccttgacgctgccgcaggtggagcgcctggcggacttgccgtcgctgcccgccgcacagcgtcaacggatcgttgaggactggaacgcaacggcgcgtgagtacccgttgcagcgcggcgtgcatcagttgatcgaagagcaggtagccctgacaccagaagcaccggctttggtgtttggtgcacagcgcctgagctacgccgaactgaaccgtcgggccaaccgcttggcgcatcgcctgatcgaagctggggtaggtccggacgtgctggtgggcctggcggtcgagcgctccattgaaatggtggtcggcctgctcgcggtgctcaaggccggtggtgcctatgtgccgctggaccctgagtacccgcgtgaacgcctggcctacatgctggacgacagtggcgtgaaactgctgctgacccaggcgcatttgcgtgaacagttgccgattcctcaggggctggaaaccctggtgctgggcgagtctgtattcgagcactacagcgacgccaacccaggcatcacgctggacggcgaaaacctcgcctacgtgatctatacctcgggctccaccggccaacccaaaggcgccggtaaccggcattcagccctggccaaccgtctgcactggatgcaggaagcctatgggctggatgtcagcgacacggtgctgcaaaagactccattcagcttcgacgtatcggtgtgggaattcttctggccgctgatgaccggcgcgcgcctggtggtggcagcgccgggggatcatcgggatccggccaggctgatcaacctgatcaatcagcagcaggtcaccacgctgcactttgtgccgtcgatgctgcaggcgttccttcaggacccggcggtgtccacctgccaaagcctgcaacgcatcgtgtgcagcggcgaggcattgccggtggatgcccagcagcaagtcttcgccaagctaccgcaagccgggctctacaacctgtacggcccaactgaagcggccatcgacgtgacccactggacctgcgtcgatgaaggccgtgacgcggtaccgatcggcaaacccattgccaacctgggctgctacatcctcgacagcaacttcgaaccggtgccggtgggtgtgttgggcgagttgtacctcggagggatcggtctggcgcgtggttaccaccgccgtccggcactcaccgccgaacggtttgtcgcccatcccttcatcaagggggagcgcctgtaccgcaccggtgacctggcgcgctaccgcgaagacggcgtgatcgaatacgccgggcgcatcgaccatcaggtcaaactgcgcggcctgcgcatcgagctgggtgaaatcgaagcgcggctgctggagcatgcagcggtgcgtgaagcggcggtattggcggtagacggccaatacctggttggctacctggtcttgcaggagcaggatgcgcagtggcgtgaaaccctcagtgcccacctggccagccatttgccggactacatggtgccggcacaatggctgttgttggagcagatgcccctgagccccaacggtaagctggaccgcaaggcattgcctaagccggacactcagtcgacccagcgttttgaggcaccgcagaatgagctcgaacagaaaatcgccgcgatctggaccgatgtacttggcgtagagcaagttggggtgaacgacaacttcttcgagttgggtggtcattcgctgttggtattgatgctcaaggagcggattcgcaaggccagcagcatcgacctttctgtcagccagttgatgctcaacccgaccgtgcgtgcgcaagtcggttgcctgcaagggacggcacgtcgttcgctgctggtcccgctcaacggtcagaacacgggcacgcctgtctacctgttccaccccagctatggttcggtgcattgctacaaggctttggccctggcgttgcgtgagcagcggcctgtggtcggtgtgatttgtcgcgcattggccgaggagggtgcgcaagtgccgacctgggccagcatggtcgaggattacatcacgcagttactggaagctcagcccgaaggcgccttccgcctggccggctggtcgctgggcggcaacctcgcggtagaggttgcgcatggcctggagcaggcgggccggaacgtggagttcgtgggttggatcgactcggcccccccgcgttggctcactcagtattgggatgcggccgtcatcaccgatgagcgcgagatctccgataatgatcggcgcgtggccttgctcggtgtgatgttccctgcgtttgcagaggcgatccatcgcacctggcaggctttgcaagtggccgacgacacggcggatcagcaatgggcagggttcatcgaatgggctgaaaccaccttgggtgaagctttccgcgacattcagcaaacgctgttgggtggcaacgaggcacaggtttcctgggaggttgaccgcaccttgttcaagcgtatggagcaggctgacttcaagccactcaaggcgccggtgagttgctggtgggcggccatgagccgtgcgggccagcacaaggcgttgatcgaagacagtatggctcgggtgctcggccaggcggtggtgcggtcggtggagatcgatgtggaccacgaacggatcatcgacaatgccgagttcatacgcagctttgtgatggccatggagtaaccgtcgcttaaaccacaagccccggctcatgggtgtgagccggggcttttttgtggggcaaaggtgtgcacggcagaggcaccgtaccgcccataaaaaaacaccctgcgcaggtgttgcctgctcagggtgtcggggggtgccggtgtagggtcagaagtcccagcgggtcgaaaacatcacgttgcgtgggtcgccggcgtaggacgaggtgtagaacccgatgttggtgtagtagcgcttgtcgaacacgttattgacgttcaccgaggccgagaggtttttggtgatctggtagcgcgccattgcgtcaaccagccagtacgggtcttgggagaagcgctgggtcactctcttgccgcggttgtagacgtcctgccaggcctcgccctgccagcgggcgccgccgccgagggtcagtttgtcgagcgcgcccgtcagcttgtagctggtgtagaagttcagctggtcctgaggttcccaggtggagaacttcttgccgtcgtcatcgcggatcactttgtgggtgtagcccgcctgcacttgccagcccggcagcagttcacctgagatctcggcttcatagcccttggttgtggcctggacgcccttgtaggcccactcgacaggcgagttggccggcatattgttgttgtactcagtgtcttcctcggcacgattggactcatggatctcgaagtaggccaggctggcgttcaagcggccgtcgtagaactcacctttcaggccaatctcgtagttctcgccttcgtctggctcgaccatcttgttgttgcggtcgggccgcagttgttgcggcatgaagatcgaggtatagctgccgtacaccgagaaatttttgttcaggtcatacaccacacccgcatacgggatgagcttgccggtttcgcgcgaatcgttggtgccggtcaggcggtagtcggtcaggcgtgagccgagcaatacggacagatcatcggtgatgctcaggcgggtcgagaagtagacggcggcctggcgggtgatgtcgtctttttcgtgggcagggccccattgtggttcaaggctgtcaccgttccattcatagagcgggaaattgttgctgtctcgataggtcgcttcatagccgtaatagtcgttgccttcccagtgtgaacgcgacaccgaggacccgacgaccaactgatgttcgcgcccagccaggctgaacggcccggagaggtagaagtcaccgttgttgctgatggtcttgccggtgaacttggaaccatagactgcagttctgtcggtagtgcccgagatcggcgacgcataacccaatggcgcgttgtacccattgagctggttgctgtagttggccttggcgatccagccattatccagggcgtgttccagggtggcgaatacactgcggctgtattgcccccagctgctccacttcggcccgttgttgtagccacggtcgaacttgatttcattgcctacaccatcgaaaagcgagcggctgcccgaccagctcgatcctttgggatcgttgttctggtaatcggcgccaacggtcagcagggtgtccggggaaaggtcgaattcgaggatgccgtagtagacattggtcttgcgttcgtagtggtcaatgaacgaatgcttgtcctggtacgccacaacggcgcgcccgcggacattgccgctatcggtcagcgggccgctcacgtccagttcagagcggtagttgtcccatgaacccgcgcccaggcctacgtggccctggaattcggcggtcggcttcttgcgcaccaggttgatggtgccgccagggccgccggcgccggtcatcaggccggtggtgcccttgaggatttcgacgcgatcgtagatagccatgtcgctgagggtctggccagccgagtaaccctcattgcgcgtagtgggtacgccgtcatactggaaattctggatcgggaagccgcgggaatagtagttggttcgttcgctgtcgaaggtcgagacagtgatgcctggcgtgtggcgcatcacgtcgtcaataccgttcaggccgaagtcgtccatggtctggcgggtgacgacggaaatcgactgcggtgtctcacgcggcgtcagcaccatcttcgtagcggtcgcgatggtacctggcgtgtaggaaccggtgccttcggtaatggtgcccaactggttggcattgatctgggtcgcgcccagctccaaggcgccggtgccggaggcgggtgcgttgatgatcatcgagctgccctgcaggctgtagctcacgccagtaccggccagcaggcgttcgatggcctgcaccggatccatcttgccgctgacggcgctgctgtgtttgtctttgacggtgtccgggctatacaggagctgcaggttggtttgttgaccgaatacctgcaacgctgtactcaaaggttgcgccgggatgttcaattcgaactcttgcgcctgaacatagcccgccactggcaggctgaccgcaagggccagggcactggggagaacgtttaatttcaaagcccgtcgcatggagactgcggtgctcaacgggctgagggcaagccgtactggcatggattgtttctctttttagatgttagcagataggtacttaatgcggttaattctcattgctgcatatgagacgttcgcactcgcataaaccggaaaaatttatgcgggctccagttctgcaacgacttttccggcactcaaacgcaccaactggtcggcaatatcgaaatagcggtcgtcatgactgatcacgatgatcgtcttgcccaggcgcttgaggtccggcagcagttccgtgtagaagatgcggcggaaggccgggtcctggtcggcggcccattcgtcgaataccagtaccgggcgctcttccagccaggcgttgaccagggccaggcgcttgcgctgcccggtggagaggtcggtggtgctgaacacgccgtccttgacgctgaccttgtgcgcgatttccaggcgttccaggtacttggcggcgctgtccagcgactgcgtggcactgccctgtaccaggtcatcgaataggtagtagtcggcgaataccgtggtgaatagctgacggtagtcgtcgcgcgccgggtcggtcacggtttcgccgttgaggcggatttccccggcgtggggttgatacaaaccgagcaacagcttgatcagggtggtcttgccgcagccgttctcgccgacaatgaacacgatatcgccctgctggatgctcaggttgatcggccccaggtggaacggctggctgccttccaccggcggcgggctgtaggtcacgccgcgcaattccaggctgttgaccaccggcgtgggggcttcgctgccatccatgagcaagtgcggctcgggtgacgagaagcggtcggacagctcggtgatgcgcgcaaaggcaatccgcgccttgccgatgatcggcaagtagccaaccacatgctccagcgggcctttcatgtacagcagcaccagcacgaagccggtgatcactgcggggtccgggttcgggttataggcctgcatcgccagggccaggccgatgaccacgaagaacagcatcgagccgaaggtcttggcgacgatatagatgttcaccgaacgcacctggatatcgctgatgcggtcggcggtttcctggatgcggtgggtgttcatgcggtagcgacgtgggcgatggatgcgcagctccttggcaccggaagaaatcgcggagtagtagcgttgcaattcgtcttcctggtcgcgggcttcgtcgaagccacggatgcccttgtgcccggcgatgaattgcacgctgctgccaatcacgatggcaacgatcatcatcaggaacatcggcaccgacaggtacgccaggtagccaaggcaacccagggtcacggtagtcgcgatggccagcggcgtgaacgcaaaggaaaaatcactgatggtgtcgacgtcatgggtcagcaccgggatcaggcggtgagagcgaaattgctcgatctgctcgatgggcgccgaaagcaccttctcacccagttccttgcgcagtgccgcaatgatgcgttggcccacatagttggtgccgatatcggagacgatcgagctggtgagtgccagcacacacaacgccgcaaacgtcagaatcaccccctgcgtcatcccggtggacgagtgcaaggcgttgttgatggtcgccagcaacagcgtgatggccaggccgccggccatgcccagggcgacggagacggtcacgatggtgcgaaagggcctgagcaatgcgagcaaacctttgaaggcgccgcgcttggggtcggtcataaatacttcccggaaagtgaaaaaagagggggctgggcacacagacccttacccatgacaaacgaaggattggcgtgactatttagcgcggcgtgcccggcggtggcggggatggataaattaggcggggcctggttcgttcttgtggagtagccgcacgcgttttggcgcgtgcctgatttatccagcgagagcgaaacaatgacgaaaaggaatctggtgtacgtgtggtcactgcgcaatgccgccgccgacaaggcaggacagccagtggcctacaaggaccacgagcgctacatgatgtcggtgctggaatccctggcaggggccctgaacgacacgccgctgggcgaggcttataacttggtgggcgtggtatatgacgatgacgagcagaacccgcgcgaccagcaactggtccgcgactacggcttcgcctaccagccgggccgccaatggctgtacccggccgacctgcgcgtgcaggggcgcctggtcaatgacttgctgctgagcgtgccgtccacctatcggcgcctgccacggggcagcgcggaacacatcgccggcaagcaggacttcgaacgtcgcctgcacgacacgctggtggaattgaaggcggacatcgtggtgctcgacggcctgctggtgatcctcgatgagctggtgcgccctggtgcgccgtttgccggccgcatcatgaacatccaccccggtattacccgcatcgaatcgccgtacgagcgccgtggcgcctatgccacctggaacgcgctgtacggtgcgcgggggctgacggtcacggattgggcgaccaaggccaccacgccatccgagccgctgtacctcaccggtgcctcgtttcactacgtggacaacggcattgattccggtgaagtgttccacgacgtgctcaagaccgagatcgcgccggacgacaccatccttgagttgcgctggaacaacttcaacaacagcctgttcccggcgttgcatgaagggttggcgttgttggcccagaaggcaatctaaagcagccacggttaaaaatgtgggagggggcttgcccccgatggcgggagtgactgatacaccgccatcgggggcaagcc

SEQ ID NO: 80 - DNA, 36609 bp, Pseudomonas nodulensis
ttgcccccgatggcgggagtgactgatacaccgccatcgggggcaagccccctcccacaaatggatttccagtgcggttagaggtcgcgcacgacgcggaacccaatccaatccccccgcgtctgcgggtagatggtgttgcggttgcccgagcgtgaaaacaccggtgcctcgccccaatcattgccgcgaatcatgtagccctcgcagttcggctccatccacgcactgccatcggtgggcgcgccgatgtagttggggtgttcgcagtcggccacgcgctcgtagacgttgccatgcatgtcgtacatgccgaaggcattcggcgggtagctgcccaccggcgatgaatagctgtagccatcggccgggccataggtgttggcgtgcttggcgatgctgtagtccttgccctcgtcgaacgggaaggggaacggtccggtggagccggcgcgcgcggcgtattcacgctgggcttcgctgaccatgtggtactgctggccggttttcttcgacagccaggcgacgtattgcttgatgtcgtccatgtccatgcataccgccggctggcgcgggccctgggggtagcgtggcttgctggcgatgcattcacggccgggacgggtgtcgccgtcggcgatcttcacgccggtctggcggatgtagctgtcccattcaccggaggtgatatggaaacggctcatggcgaacggcttggcgaaggtcacctcgtgcatcgggccttcatccggctcgcggccgacttcatcctcgggggtgcccatggtgaaggtgccagccggcagcaccaccatttccgggcagtccttgcagtccttgaacactttgccgggttgcggcgtggcggcctgggccaggttgggcagcaaggcgccgcacagggcggtgagtgccaatgccgtgaggggtttgttcatggggtcctctcattcaaagtggaaaagcggtgcattacacccgttggtccagcagcgtcatgaaacgctggatctcatcggaggaattaagcaggccgggcgaagtgcggatcaccgggccgacatcacggtccactgcgtcgatcaccacgcggtttttcatcatgtagtcggccacggcatcgctgtcctggcccttgacccggaagaaggtgaagccagccgacagctcgggactgcgcggggtgaccaactcgatacgcgggtgcgccagcaggtggtctttcagttcgctgttcagggcgtggatgcgcgcctgcacctgcgccttgcccaactgcagatgcagcttgaaagcctcatcggctgcccagcgatgctcgaaggcgtgataaccgcccggggtcatggtggtggcgaagtccttgtcttcggagaaggtcggcaccatcggggtcacgtactggttttgcgggtcgcgggcgcacaccacaccggtgccccgtgggccgaacatccacttgtgggtgccggcgatgaaaaagtcgcagcgcatgtccgggaagtcgaggttttccacgccgaaaccgtgcacaccgtccaccacatacaggatgcggtccctgtcgtcgcggttgcggttgtgttcttccaccagcttgccgatctcgccgatgggcagtttcacgccgctgccggactgtacccaggtcatgccgagtacacgggtgttggggcggatattgcgctggatattgcccagcacctcgtccacggacacctggttggcgtttttgaacaggctgatcttgcggacctgggtctgctccttgcgcacccggaagtccaggctgaactcggtagcgtagtgttcgtggacggtggtgaggatctcctggtcaggccgcaccttgatcccgccataaatcatcgccagcccttcggaggtgctgccggtgagggcgatctgcgccggcgtggccttaaggtagcgactggcccattcgcgcacctggccttcacgtttccaggtttcctgcaggccccagtccatggccaggcccgggttgcggtcgatctgcgcgcggtagcgctcgatggcttcgcgcaccggcttggggtgcgtggccaccaggaagttggaaaaatgcaggtagtccgggtcctggttgaacagttgcttgaaccccgtccatgggtcattcgatgcaggggcggcgatagcctggggcagcagggcggcgcccagtggcaggctggcggcaaataccccggcctgcttgaggaacgtacggcggtcggtcatggactggcttctggatgattaacggttggccaacggcttggcggatttttgtacctggtcccacacccgcaggaagttgccgccccacagtttggcgatatcggcttcggagtagccgcgctggatcagttcggcggtgacgttgcggatttcgccgacgttgttccagccctgcacgccgccgccatcgttgaagtccgaggcgaggccgacatggtcgatgccgatcttgcgcacggtgtagtcgatggcgtcccccaggtccttgagggtggccttgggttcttcatcgaggatgccgtacagcgcgctggcgtactcgccgaacttgtgttccggccaggcggcgatgatcgcgtcgcccggcatcaaggccacggccaggttgggcaggggcggcaggtcgaaccgtgcgcgcaggtcattgagcttgtcccgggtcggctggctcaacgggcgcaggtaggcggagaagcccacgatctgcactacgccgccgctctgcttgatcagttgcagctctttgtcgctcaggttgcgcgggatatccaccgacgcacgcggcgccgagtgggaggcgaccatcggtgtgcggctcaactgcgccacctgctccagggccttggtcgacatctgcgatacatcgatgatcacccccaggtcattgaggcggtgcaccgcttgcttgccgatgtccgacaaaccgtcgagggcgtcggtggagtcattgaaaaacggcagcgggcgcgacgagtccgaccaggcgttgttgcctacatagctgaagccgaacatgcgcatgccgcgcgccgcccacaggtccagcaggttcaggtcgttgcccagcgggtaggcgttgagcatgctgatgaagatcgcgaacttgccttcgccgtgcaggcgccggaaatcatccggggtgtaggcgatggcgacctggttggggtagtcgcgcaccatgccgctgatgatcttgtagcgcacttcctgttcgttgcgcgcggcttcgacaaaaccgtcggtgggcttgtgcggggcattggggccgttccagatttccggccagccgaaaatcgtcagcgccgcaccggacaagcgcccgcgtgccgctttggccaggtcaaactggccgctgccgtccttgtccgcctcgttgcctgcggtgccgaaatcgatgggtacggtgatatggctgtcgaacgacaacagccggtcctgcatttcattggcctgcttgatcacctccaacgggtaaccggcattgcccttgaaccagtgatcccagaccaggaaaccggctccggcaccgatggccagtgccaacggcaagccgatatacagcgcctttttcgaacgtggttttgtcattgccatctcagtcagttgaggccttcgctatcaggaaagaacgagtgataggcagggaaatttaggcgggcagggcgcgccggtaaatttccccggcgtgcaaacgttctagctctgataaagccgtttcctaaggtagacaatgaccatctctcgacgtgggttcatcgcaggcctggcgctgaccggcgccgctgtgccggccgccttctatgcccatcgcgagttgacgcgtgaagaagaattgcccatcacccccggcgaagccacggtagacctggccgataccgccggccagcacctagcgaacacgctgcgtggggtgtggagcctgcgcctggaaggccgcgacgccggcctcaagggcctgccgttggaaggtctggagttgctgctcgacatcgccccgcgtggacgtggcttgagggggtacctggacaccgctgccaacctgcgcgccaggggcgagccacgttaccgcgtgctgggtgacctgctgacaggggagagcgccgtgctctattggcgcctgatcgaccgcgacgcgattgacggcgtccccgcctatgagttcaagatgacccttgaccaggtctgggcggattttgccaatgccggcagcagcacactcagcggtcagatccttgacctcgaccggcccttggcgctggtcgagcgtgataaccgctttatcgcgcataaacagtggttccccgaggcccggcaacgcatcggtctgaacccgaccctgctggcctggctgatttcccccgaacaccgtctgttccaccaactgtggcatgccacccgtgaccagtggcacaaactctccgaagaaaagcgcgacgccctgcgcggcatcggctggcaacccggcccgcgtggccaggagcgcgacgcccggggcaagcgcaaggaccgcaacggctcgggtatcgacttcttcttcatgcaccgccacatgctcggcaccgcgcgctccatgcaggacctgccttcatggccgcaattccccgagccgcaaccggccttggagcgcgatcgcctgggctttctgcgctacttcgacaaccacgacggctttgcgctgccgcccacctggtgggcgccggatgacagcgactacacccagtgggtcagcgacatcaaggccgccgagacctatcacagcaatttccaggtgtgggagtcgcagtaccgcgacccgcgctacctggccagattcaccctggggcagctcggttccgaaatggagctgggcctgcacgactggctgcacatgcgctgggcctcggtgccccgcgacccgtccaacggtgcaccggtgcccatggcccgcgacccctccgacttcgccccgcgctggtacgcggcggaaaacgacttcctcggcgatccgttttcctcccacgtcaacccggtgttctggcacttccacggctggatcgacgaccgcatcgaagactggttccgcgcccatgagcgtttcaatccagggcaagtcagccgcatggaagtcaacggcgtagcctggttcgcgccgggccgctgggtggaagtcggcgacccctggctgggcccggatacccacggctgcagcaccaccccagggttgcagatgggccggtcgatggagatggacccggagaccatgaagctggcgctgcgcatcaccttcggtgaagacgaaaacaggctgcaggggctgttcaagcgggtgccgagacgaccgtggtacgcccggcacctgaaacttgcctgaacctgtagtgagcaggcttgccctgcgttggggcgcgaagcggccctaatccggccacctcgttttacctgaaagaaccagcggctttgatggggccgcttcgcagcccaacgcagggcaagcctgctcgccacagcaagctaaattgaaccaatcccgtcccaccttgtccccgcttcccatgtcaccccccgcccgccaaatcccttaattttccaagcctgccggaagcctctccaggcccccggctgcgcccgcgttttttgacggcggtgcgcccagcagacccgatccaaacggcagctgaaaacggactttcttctcaaccgtgacttatcaggcaggttacccccatgcagttcagcgaattattggcagcgatttccacccacgcgatccgtctgcaactggaagaaggcgacctgatcatcctgggtgacgacgaggcgctggacgatgcgctgtgggatcaactgatcgcccacaagccgcgcctgctggaactggtcgctgaacatggcggtgactggctgagcccggcctaccgcatcacgccggacatgctgccgctggtcagcctcgaccaggcggccatcgaccgtatcgtcgccgctatccccggtggcgcggcgaatgtgcaggacatctacccgctggcgccgctgcaggagggcatgctttaccaccatctgtcggcggagcagggcgatccctacgtactgcacgcgcagttcgagttcgacagtcgtgcacgtttgcaggcgtttgccgaagccttgcagtgggtgatcgatcgccatgacatcctgcgcacctcgatggtctggcagcgtctcgacgagccgctgcaagtggtgtggcgcaaggcaaccctgtcgtgcgaggccgtgggcttcgatgcgcgcaccgatcgcatggacctgggccaggcaccgctgctgcgcctggtgtacaccgcagatccagcggacgggcacgtggcggcaacgttgctgtttcaccacaccatcctcgaccacaccgcccttgacgtggtgcgccacgagatccagctgtacctggccggccaacaagcccaggccggtgagccggtgccgtttcgcagctatatcgcccaggtgcgccatggcgtcagcgagcaggcccatgaggcgtttttccgcgagatgctggcggatatcgacgagccgacgctgccgttcggcttgcaggacgtgcagggcgatggcctgggcatcgacgaggcgcgcgtccccgtcgacagcgcactgagtcgccgcctgcgtaccctggcccgcccgctgggcgtgagcgtggccagcatgatgcacctggcgctggcccgcgtattgggcgtggtcgccgggcgtgacgcggtggtgttcggcaccgtgatgctcgggcgcatgggcgcgggcgagggcggggagcgagccctgggcatgttcatcaacaccttgcccctgcgcgtggatgtgggcgagcagggcgtgcggtccggggtcaaggccacccatgagcgcctcaccgcattgctcaatcacgaacacgcctccctcgcgctggcccagcgctgcagtggcgtggcggcgccgacgccgttgttcagcgccatgctcaactaccgccatagcgccgccacggacatggccgaggtgatcgaggtggccgagggcatccgcgtgctcagtgccgaggagcgcaccaactacccgctgacggtcaacgtcgatgacctgggcgaggattttgcgctgacggtgatggtcgatgccgccattggcgccgaacgggtcgccgcttacctgcataccgccctggacagcctggccgacgcccttgagcagcgaccggatatgccgctcagcggcctgaacatcctgcccgacgccgaacgccacaccctgctgcacggcctcaaccacagccccacccaatacgccgataccgcactgatccaccatcaagtcgaagcccacgccgccgcccagcctgacgcgattgccctgcgctttgacaaccagcgcgttacctaccgccagctcaacgaacgtgccaaccaggtcgcccatcgcctgctggcccagggcattcgcccggatgatcgcgtggcgatctgcgtggagcgcggcccggagatgatcatcggcctactgggcaccctcaaggccggcgccggctacgtgccgatcgacccggcctacccgctggaacgcatcgcctacaccctggccgacagcgcacccttggcggtattggtgcaagccaatacgtgccatctggtcggcgacctgccacagatcgacctcaatggcttgcgcggcgagtccatcgtcaacccacgcgtcgacctcagcccggcccacctggcctacgtgatctacacctccggctccaccggccagcccaagggcgtgatgatcgaacaccgccaggttgcgcgcttgttcaccgccaccgaacactggttcggcttcaaccgcaacgacgtctgggcgttgttccattcctttgccttcgacttctcggtatgggaaatctggggtgcgctgatgcacggcggccagttgctgatcgtgccgcaactggtcagccgctcgccggacgagtgctacacgctgctctgcgaagccggtgtgagcgtcctcaaccagacgcccagcgccttccgccaattgatcgctgcgcaaggccagaacccccagtcccattccctgcgccaggtgatcttcggcggcgaagcgctggaaccgggcctgctcaagccgtggtacgcccgggcgatcaacgccggcacgcaactggtgaacatgtacggcatcaccgaaaccaccgttcacgtgacctatcgcgccctggaagcggcggatgcgcagttggtcggcgtcagcccaattggcgtacgcattcccgacttgcagttgtatgtgctcgatgcacgccgcgagccgttgccgctgggggtagtgggcgagttgtacgtgggcggcgccggggtggcgcggggttacctcaaccgtgaagcgctcaccgccgagcgcttcctggtcgacccggccagcggccagcgcctgtacaagaccggcgaccttggccgcctgctggcagacggcagcgtcgaatacctgggccgcaacgatgaccaggtgaagatccgtggcttccgtatcgaactgggtgagatcgaagcgcacctggccagcgccgagggcgtgcgtgacgcggtagtcatcgcccgtgaagaccagctgggcgacaagcgcctcgtggcctacgtgatagccgagggcgaactgcgtgccgccgacctgcgcgaccacctgttgctgagcctggccgactacatggtacccagtgcctttgtgctgctggataaattcccgctcaccaccaacggcaaactcgaccgcaaggccctgccggcgccggatgccgatgccctggcgcgccgcggttaccacgcgccccaaggcgcggtggaaacggccatcgcggcgatctggcaagacctgctcacgcttgaccgggtggggcgtgacgacaacttcttcgaactcggcggccactcgctgttggcggtcaagctgatcgagcgcatgcgccaggtcgatctcagcgccgatgtgcgcgtgctgttcggccagccgacgctggcggcactggccgctgcggtgggggggcagcacgaggtgcaggtgccggccaaccggattaccgccgccacccggcacatcaccccggacatgctgcccctggtggagttggaccaggctggcctcgaccacattatccagagcgtgcccggcggcgtcagcaatgtgcaagatatctacggcctggcgccgttgcaggccggtatcctgtatcaccacctgactaccaccgaaggcgatccctacgtgttgcaggtgcagttcagcttcgacgaccagacggcggtggacgcgtttgtccaggcgctgcacagcgtgatcgagcgcaatgacatcctgcgcaccgcgatcctctgggaaggcctcgacgagccggtgcaggtggtattgcgccaggcagcgctggccgtggagcgcatcgacgaaccgctggcgcagttgcagcaacgcttcgacccgcgtcacttccgcctggacttgagccgtgcgtcgctgatgcgctttgtctacgccgaagagcagggccgctttgtcggcatcctgctgttgcaccatatcctgctcgaccacaccgcgctgcaagtgctggtggaagaaatgagcgccagcctggccggcaacagcgcgcaactgcccgccgccgtgcagtaccgcaactacgtggcccaggcgcggttgggcgtcagccaggcgcagcacgaagcgttcttcagcgagatgcttggcgacatcgacgagccgaccctggccttcggcctgcaggacgtgaatggcgatggaagcggtatcatcgaggcccatttgcccttggagccggcactgagcctgggcctgcgcgaacaggcgcgacaactgggcgtgagcagcgcgagcctggtgcacctggcctgggcgcaggtgctggggcaggtgtccggccaacagtcggtggtgttcggtacggtattgctggggcgcatgcagggtggcgaaggtgccgaccgggcgctgggcatgttcatcaacaccttgccgctgcgggtcagcctcggtgccgtgggtgtgcaagccggcgtgcgcgccacccatgcgcgcctggcgcagttgctcgggcacgaacatgcgtcgttatccctggcccagcgctgcagtggcgtgccgggttcgctgccgctgttcagcaccttgctcaactatcgccacagcgcaccgggggaggcgccgggagacaacccgttcgcggcctccggcattcagatcctcagttccgaggagcgcagcaactacccgctggtgctcaacgtcgatgacctgggcacaggctttgccctcacggtacaaggcgtggcgagcctggatgtgcagcgcgtgggggactatatgctcaccgcgctgcgccatctggtgacggcgttgcaacaggcgccgaccacgccgttgcaggcggtgtcgatcctgccggccgccgagcgtcatcagatactggtggacttcaacgccaccgctcgcgagtacccggtgcacctcaccgtgcaccagttgttcgaagcccaggcgctggcccggccggaagcggtcgcggcagtgcagggcgcgttgtccctgagttaccgtgacctcaaccgccgcgccaaccgcctggcccatcacttgctcaaccagggtgtgcaacccggcgagagcgtggcgattgcactgccgcgttcgctcgacctgctgatctgccagttggcgatcctcaagtgcggcgcggtgtatgtgccactggacatcaacgcgccggtcgaacgccaggcattcatcgtgcaggacagtggcgcacaccgggtgctgacgaccctggccgacctgaacctggacgcgctgtcgccgcgcaacccggaactgccgcaggctgccgaaagcgtcgcctacatcctctacacctccggctccaccggcgcgccgaaaggcgtgcaagcgccgcaccgcgctatctcgcgcctggtgctgaataacggttatgccgatttcaatgcgcgcgaccgcgtggcgttcgcctccaacccggcattcgacgccagcaccctcgaggtgtgggcacccctgctcaatggcggctgcgtggtggtggtcgagcatgcggtgctgttgtcccaggccgcgttcgctgcgttgttgcaggagcaagccgtcagcgtgctgtggatgaccgccgggctgttccaccagtacgccgacgcgctgttgccggtgttcgcgcagttgcgctacctgatcgtcggcggcgacgtcctcgacccgcaggtgattggccgcgtgctcaggcacggcaagccccggcacctgctcaatggctacgggcctaccgaagccaccacgttttccaccacccatgagatcacccgggtcggcgagggcggtatccccatcgggcggccgatcgccaatgcccaggcctatgtgctggacccgcgccagcaaccgctgccgttgggtgtggttggcgagctgtacatcggcggcgcgggcgtggccacggggtatttgaaccaaccgcagctcaccgccgagaaatttatcccgaaccccttcggcgagggcctgctgtaccgcaccggtgacctggcctgctggcaggccgacggcaccttgctgtaccaggggcgcaatgacctgcaggtgaagatccgtggtttccgcatcgaacccggcgagatcgagacctgcctggccagtttcccgggcgtgaaggacgtggtggtgctggcccgcgaagaccagcccggcgacaagcgcctggtggcctactacacggccagtgtggcgctggagattgaagccctgcgcgctcacctgcaaggccgattgccggactacatggtgccctcggcctatgtgtggctggagctgttgccgctgaccgccaatggcaagctcgaccgcaagggcctgccggtgccggaccagagtgcgctgctcagccgtggtttcgaggcgccggaaggcgaagtggagacccagctggcgcagatctggcaggacgtgctcaagctggagcgggtcggtcgtcatgatcatttcttcgaactcggcgggcattcgctgctggcggtcagcctgatcgaacgcatgcgccaggtcggtctgagctgtgacgtgcgcgtgttgttcagccagccaagcctggcggcgctggcggctgccgtgggcagtggccgggaaatcgtggtgccggccaatggcattccacagggttgcacccggatcacgccggcgatgctgacgctggtgcaactcgacccggcggccatcgaacgtatcgtggcgaacgtgcccggcggtgcggcgaatgtgcaggacatctacccgctggcgccgttgcaggaaggcattctctaccaccacatcagcgccgagcagggcgatccgtacctgctgcaatcgcgcatggccttcgacagcctcgaacgtttgcacggcttcatggaagccctgcaacaggtggtggcccgtcacgacatcctgcgcaccggcgtggtctgggaaggcctggacagcccggtgcaagtggtttggcgcaaggcgcagctgagcgtgcaagcggtcgacctggacccggccgacggcgacatcatcgagcagttgcacgcacgcttcgatgcccgtcactaccgcctggacatcacccaggcgccgttgctgcgcatggtgtatgcccaggacccggagcatcaccgggtggcggcgatcctgttgttccatcacctggcgctggatcacaccgccatggaggtggtgggccaggaaatgcgcgcgttcatgttcaaccaggcgcaggacctgcccgaggcggcgccatttcgcaactacgtggcccaggcgcgcctgggtgtcagcgtggaggagcacgaggcgttcttccgcgacatgctcgccgatgtggatgagccgaccttgccgtttggtgtacaggacgtgcagggcgatgggcgcgatatcgaggaagctgaacaggctgtggatgccgcgctggcccaacgggtacgcgaacaggcgcggcaactgggcgtcagcgccgcgagcctgatgcacctggcctgggcacaggtgctggggctggtgtccgggcgtgacgacgtggtgttcggcaccgtgttgatggggcgcatgcaggccggtgacggcgcggaccgtgcgctgggtatgttcatcaacaccttgcccttgcgcgtggatgtggcggccactgccgccgctgcggtcaaggccacccatgggcgcttgagtgccttgctcggccatgaacacgcgtccctggcgctggcccagcgttgcagcggcgtggcaggtgcatcgccgctgttcagcgccttgctcaactaccgtcacagcagccccggtgaaatggcccgcgacggccacggcatctgggaaggcgtgcaactgctcggcggcgaagagcgcagcaactacccgctgaccttgagcgtggatgacctgggtgaaggctttgccctcacggtactggcgctgccgcagatcggcgcccagcgcttgtgcgcctatatgcataacgccgtagaacaattggtggcctgcctggaaaacgcaccgacgaccgtgctcaaccaactgccgatcctgccggcggcggagcgcgaaaccctgctgcgcgatttcaacgccaccgccgaggagttcccgcagaggcaaaccgttcatggtgcctttgaggtgcaggccgaacgccaaccccaggccgttgcggtggtgcaggacggtgaggcgctgacctacgaacagctcaaccggcgcgccaaccaactggcccatcatctgttggggctcggtgtacagcccgacgaccgcgtcgcgctctgctgccgtcgcggcccgcagatgctggtgggtttgctgggtatcctcaaggccggtgccggttacgtgccgattgacccggcctatcccgccgagcgcatcgcctatttgctccaggacagcgcgccggtggcggtgctggccgaagccactacccgcgacctgttgggcagcatcgccacgctggacctgcacgacccaggcctgcagcagtatcccgtcagcaacccacggctcaacgccttgaccccggcgcacctggcctacgtcatttacacctccggctccaccggccagcccaaaggcgtgatggtggaacaccgcagcgtggaaaacctggtgcactggcactgcgaagcctttggcctggatgcgacgagccataccagcagcgtggccggtttgggttttgatgccatggcctgggaggtctggccggcgctgtgcgtgggcgcgaccttgcacctgccgccggccgatctgggcaatgaaaacatcgacgaactgctggcctggtggctggcgcaaccgctggacgtcagcttcctgccgacgccggtggccgagtacgcgttcagccagcagctgcaacacccgaccctgcgcatcctgctgatcggtggtgatcgcctgcgccagttcacccacgaacggcgctttgcggtgatcaacaactacggccccaccgaagccacggtggtcgccacctccggccgtgtacgcgccgggcaggtgctgcatatcgggcgacccgtcgccaacggccgtgtctacctgctggacgcgcacttgcgtgcggtgccggtgggcgtagcgggcgagttgtacgtgggcggcagcggcgtggctcgcggttacctgaaccgcccggacctgaccgccgaacgtttcctgcaagacccgttcaacaccgggcgcatgtaccgcaccggcgacctggcgcgctggttgcccgatggcgctatcgagtacctgggccgtaacgatgaccaggtcaaagtgcgcggcgtgcgggttgaactgggcgagatcgaaaactgcctggcggccgcggaaggcgtcggcgaagcggtggtgctggtgcgcgacggccgcctgatcgcctggttcaccgcacagcaaccactggacatcgaggccctgcgtgcgcacttgcaagcccaattgcccgaggcgctggtgccggtcgcctatgtgcaggtgcaggcactgcccctgaccgccaacggcaagctggaccgcaaggccctgccgcagccggatcaagcggcgctgctgacccgcgaatacgcagcgccccaaggcgaggtggaaaccaccctggcgcgcctctggtccgaggtgctgcaggttgaacaggtggggcgccatgaccacttcttcgaactcggcggccactcgttgctggccgtcagcctgatcgagcgcatgcgccaggtcggcctgagtgccgatgtgcgcgtgctgttcagccagccgaccctgaccgccctggccgccgccgtgggcagtggccgcgaagtgcaggtgccggccaatcgcattactgccgattgccggcgcatcaccccggacctgctgacattggtgcaactcgaccaggcgacgattgatcacgtggtcgcccaagtgcccggcggcgccgccaacgtgcaggacatctacccgctggcgccgttgcaggaaggcattctgtaccaccacatcacggccgggcagggcgacccgtacctgctgcaatctcacctggcgttcgacaaccttgagcggctgaatgcctttgcccaggcgttgcagcaggtgatcgaccgtcacgatatcctgcgcaccgccgtggtctgggagggcctggcgcaaccgctgcaagtggtgtggcgcaaggccgagttggcggtgcaggcggatgtgcttgagcacctgcaccagcgcttcgacccgcgtcagtactgtgtgccgatgaaccaggcgccgctggtgcgcctggtgtatgcgccggacccggtgcatcagcgggtggtcgcgatcctgttgttccaccacattgccctcgaccacacggcgctcgacggcgtacgccacgagatgcaggccagcctgctcgggctgccgcagccgagcggtgcggccacgccgtaccgcaactacgtggcccaggcccgcctgggcgtcagcgaagcggagcatgagcagttcttccgcgggatgctcggtgatatcagcgagccgacgttgccgtttggcttgcaggatgtgcgcggcgacggcaacgccattgaagagctgcaactgaacctggacccgtcgctcaaccagcgcctgcgcacccaggcccgcttgcagggggtgagtgccgcgagcctgttccacctggcctgggcgcgggtactggccagcacgtccggccaggaacacgtggtgttcggcaccgtgctgctgggccgcatgcaaggcggccaaggcagtgaccgtgccctgggcatgttcatcaataccttgccgttgcgtgtcgacatcgatgggcgcggcgtacgcgctgcggtcaagcagacccatgcacaactgaccgcgctgctcggccatgaacacgcgtccctggcccttgcccagcgttgcagcggggttgccgcgccgcagccgttgttcagtgcgatgctcaactaccgccacagcgacagccggctggcgccggtgtcccaggcctgggaaggcatccagaccctggccagcgaggaacgcaccaactacccgttgacgttgaacgtggacgatcagggcgacggtttccgcctcaccgcgatgaccgcgcagtcgattggcgcgcaacgcatctgcggttacctgcaggtgaccttgcagggcctggtcgacgcgctggagcaggcaccgcagtgggcggtcaaccgcctgccggtgctggaggcccaggagcgtcagcaactgctggccggtttcaatgccaccgaagtggcttacgacctggagcagaccctgcacggcctgttcgaagcgcaggtgacgcggacgccggacgccatcgtcgtcaaggccgatgaccgcgtattgacctatgccgagctgaatgcgcgggccaaccaactggcccaccacctgctggaattgggcgtgcagccggattcgcgggtggcgatctgtgtggagcgcggcctggacatggtcatcggcctgtacgcgatcctcaaggccggcgccgcctatgtgccgctggacccggcgtatccgctggagcgcatcgcctacatgctcgacgacagcgcgccggtagcggtgctggcccagggcgcgacgcgggcattgctgggggacgtgccggtggtcgacctggaccagccgacctggcagcaacaacccaccaacaatccacaggtcgcggcacatggcgcctacgtgatctacacctccggctccaccgggcaacccaagggcgtgatcaacgaccaccccggcgtggtcaaccgcctgctgtggatgcaggacgcctatggcctcaaggcccatgaccgggtgctgcaaaaaacaccgttcagcttcgacgtgtcggtgtgggaatttttctggccgctgttcaccggcgcctgcctggtgatggcgcgcccgggcggtcacaaagacccggcctatctgtgcgaagtcatcgcgaacgaacagatcaccacgctgcactttgtgccgtcgatgctcgacgtgttcctggcccatggcgatgtaagccaggccgctggactggtgcgcgtgatgtgcagcggcgaagccttgcccggcagtctggtgcggcgcttcaagcagcagttgccggacatcggcctgtacaacctgtacggcccgaccgaagcagcggtggacgtgaccgcatggaactgcgcacggccggacgtcccggacaacacacccatcggcaaacccatcgccaacacccgcctgtacgtgctcgatgcacagatgcagcccgtgccattgggcgtggtcggcgagctgtatatcggcggcgtgcaagtggcgcggggttacctgaaccggccggagctgaccgccgagcgcttcctcaaggacccgttcaccggtggccgcctgtatcgcaccggggatctggggcgttacctggccgatggcactatcgagtacctggggcgcaacgatgaccaggtgaagatccgtggcctgcgcatcgaactgggcgaaatccaggcgcgcctgctggaacatccccaggtcagcgaagccgcggtggtggcccgtgaagagcggctcgtcgcctactacaccggcgctcgctcagccgacctgcgcgagcatctgttgcagcacctgccggagttcatggtgcctgcgctgttcgtgcacctggacgcgttgccgttgagccccaacggcaagctggaccgcaaggcactgccggcgccagacgccgatgccttgaccctgcgcgactacgaagccccggtgggcgacaccgaaatccttctggcgcaactctgggccgagctgctcaacgtggagcgggtagggcgccaggacaatttctttgaactgggcgggcactcgctgctcgccgtgagcttgatcgggcgcttgcgccaggaaggcatggaagccgatgtgcgtgggttgttcgaacagccgaccctggccggctacgccgcaatgactgaacgaatggagatcgtcctgtgagcattctcgaactgctggcgacgctgaaagccaaggatgtgcaactcgcgctcaagggcgagcaattgtcggtgcaaggcaacaagcaagcgctgagcgacccgttgatcctcgccgccctgcgcgaacataaaccggcgctgatcgagctgatcaaggctggtgactactcggcggccaacgaggtgccggccaatggcatcccggctggcgccacacagatcaccccggcgatgttgaccctgtccgagctgagccaggacgagatcgaccggatcgtcgccaccgtcgacggcggggtggcgaatatccaggacatctacccattggcgccgctgcaggaaggcattctcttccaccacgtcagcaccgagcagggcgacccctatgtgatgcagtcgcagttcgccttcgactctatcgagcgtttcgaggcgtttgcccaggccctgcaaggggtgatggaccggcatgacatcctgcgcaccggcgtggtctgggacggcttgcagcaaccctcgcaagtggtgtggcgcacggcaacgctgccggtgcaggcgctggagctggacccggccgacggcgatatcgccggccagttgcatgcgcgtttcgacgcccgccattaccgcctcgacgtgacccaggcgcccatgctgcgcctggcctgggccaacgacccggcacagcagcgcatcgtcgccatgctgctgttccatcacatggccctggaccacagcgccctggaagtggtgcgccatgaaatgcaggcgttgctgcaaggccacgccgggcaattggggcacgccgtgccgtttcgcagctacgtagcgcaggcgcgcctgggggtcagcgagcaacagcacgaggcgttcttccagcagatgctcggcgatgtgctggagccgaccttgcccttcggcctgcaggatgtgcagggcgatggccgtggcatcaatgaactcgactggccgctgacagacacactcaaccagcgcctgcgcgctcaggcccgcgtgcttggggtcagcgtcgccagcctgtttcacttgggttgggcgcgggtgctgagtgtgctggccggcaagtcccaggtggtgttcggcaccgtgctgatggggcgcatgcagggcgggcatgctacggaccgcgccttgggcatcttcatcaacaccttgccgtttcgcgtggacgtgggcgacgacgacctgcgcagtgcggtcaaggccacccatgcgcgcctcaccgggctgttgcgtcacgaacacgcgccgctggccttggcacaacgttgcagcggcgtggtggcgccgaccccgttgttcagcgcgttgctcaactatcgccacagcggcactggcaccagcagcgaagcggtggcggcgtggcagggcatcgagacactgcgttcggatgaacgtaccaactacccgctgaccttgagtgtcgatgacctcggcgaagggtttgtcctgcggctgctggcgactacccaggtcgatccgcagcgtgtctgcgcctacctgcaaaccgccctcgaccatctggtgacggctctggaggaggcgccgcataccgcgctgaatcagctggcagtggttcccgccgatgaacagcgcttgctgttgcagcacttcaacgccacccaggcggacttcccccaaggcgaaacgctgcacgcgcgcatcgaagcccaggccgcgctgagccccgacgccattgccgccgtgcatcagggccgccagctcacctatgccgagctcaaccagcaagccaacctgctggcccatcacctgctggcgctgggggtcaagcctgacgaccgcgtcgccatcgttgcccgtcgcggcctcgataccctggccgggctgctggcgatcctcaaggccggcgcctgctatgtgccggtggacccgtcccacccggccgagcgcctcaactacctgctcagcgacagcgcgccggtggcagtgttgacccagcaggcgctgttggagcgcctgccggccctcgaagtgccggtgatcaacctcgaccgctacacctggcagcaccattcggcgagcaatcccaaggtggcggtcacgccgtccaacctggcttatgtgatctacacctccggctccaccgggctgcccaagggcgtgatggtcgagcaccacaccgtgaccaacctggtggactggcattgccgcgcctttgacctgtgcgccgggcgccatacggcgagtgtcgccggcttcggctttgatgcgatggcctgggaagtctggccggcgctgtgcgtgggcgcgaccctgcacctgccaccggcccatgacggcgccgaggatgtcgacgcactgctggcctggtggtgtgcgcagccgttggatgtgagcttcctgcccacgccggtggccgagtatgcgttcagccagcagctcgaacacccgacgctgcgcacgctgctgatcggtggcgatcgcctgcgccagttcggccgtgcccagcgttttgacctgatcaacaactacggccccaccgaggccacggtggtcgccacctccggcaaggtcgaggcgggccagccgttgcacatcggcaaacccatcgccaacgccaccgcgtacctgctggatgagcaacagcagccggtgccgctgggcgtgacgggggagttgtacgtgggcggcaaaggcgtggcgcgcggttacctgaaccgcccggagctgaccgccgagcgtttcctgcacgacccgttcaaccccgggcgcatgtaccgcaccggcgacctcgcacgctggctgccggacggcaacatcgagtacctggggcgcaatgacgaccaggtgaagatccgtggcatgcgcatcgagctgggcgaaatcgaaacccagctcaatcatctggcgggcatccaggaagccgtggtgctggtgcgtgacgagcgcttggttgcgtatttcaccgaacagcgccaactcgacccgctggcggtgggcgatatccgcgcccacctggtggcgcacctgccggactacatggtgccggtcgcctacgtgaagctggacacgttgcccctgaccgccaatggcaagctcgaccgcaaggccttgccggcgccggacatggcggcgctgtttacccgcgagtacgtggcgccggaaggcgagatcgagaacgtgctggcgcagatctgggccgatgtgctgcaggtgcagcgcgtggggcggcgtgatcacttcttcgaactgggtgggcattcgttgctggcgatgcgcatggtctcgcaggtccgtcagcgcctgggtgtcgagttgctgctgggcgacttgtttgccaatgccgagttggcagcggtggctgaggtgttggctcagtcaggtcgcagcaccttgccggctattctcccggccaatcgcgatgaacccacgccgttgtccttcgcccagcaacgcctgtggttcctggcgctgatggaaggcgccaacaccgcctacaacattcccatcggcctgcgcctgcgtgggcagttgcatgtgcaagcgctgcaacgggctttggcgcgcatcgtcgcgcgccacgaaaccctgcgcagtcgctttgcccagcacggtgacgaggcccaggtggtgatcgtgcccgccgaagacgtgctgcccctgcaagtgcaggacctgcgccgccacccgcagccgcagcaggcgctggacgctctgatccatggcgaggcctcggcaccgttcgacctggagcgcggcccgctgctgcgtgggcgcctggtggtgatggccggcgatcaccatgtgctgttgctgaccctgcaccatatcgtttccgatggctggtccatgggcgtgctcacccgtgaactgatggcgctgtaccaggcctccagccacggccagcccgaccccttgccggcgttgccgatccagtacggcgacttcgccatgtggcagcgcctgtggctcagcggcgaagtgctgcagcgccagagcaccttttggcaacaggccctggccggtgcgccggccttgctcacgctgcccaccgaccgcccgcgcccggcgcagcaggactacgccggcagcagcgtcgcggtgcgcctggacgaacgcctcactgccgggctcaaggccttgagccaacgccacggcaccacgctgtacatgaccttgatgagcgcctgggcctcactgctggcgcggctctccgggcagcacgatgtggtgatcggctcgccggtggccaaccgcacgcgcagtgaagtggaagggctgatcggcctgttcgtcaacaccctggcggtgcgtatcgacacctccggcgagctgagcaccgaagcgctattggcgcgggtcaaggcccaggccctggaagcccaggcccatcaggacctgccgttcgaacaagtggtggagatcacccggccaccgcgcagcctggcccacagcccgctgttccagaccctgctgacctggcaggacagcagcgcaccgaccctggccctgggcgacctggccttggagggcatcgtcgaggacagccactttgccaagttcgacctgtccctggacttgtcggaagtgcagggcaccatcatcggtgcgctggaatacgcggtggcgctgttcgacgcatcgacggtgcagcgttacgtcggctacttcacccgcgtgttgcaggccatggtggacaacgaccaggccgtgctggaacaggtacctctggtggatgagcgcgagcgccagcacctgctgtttgatttcaacgccaccgaagtggcttatgaccttgagcagactttgcatggcctgttcgaagcacaggtgacgcggacgccggacgccatcgccgtcaaggccgatgaccgcgtattgacctatgccgagctgaatgcgcgggccaaccaactggcccaccacctgctggaattgggcgtgcagccggattcgcgggtggcgatctgtgtggagcgcggcctggacatggtcatcggcctgtacgcgatcctcaaggccggcgccgcctatgtgccgctggacccggcgtatccgctggagcgcatcgcctacatgctcgacgacagcgcgccggtagcggtgctggcccagggcgcgacgcgggcattgctggggggcgtgccggtggtcgatctggaccagccgacctggctgcatcaacctaccgaccaccctcaagtgcctgccatcagcgcctacgtgatctacacctccggctccaccgggcaacccaagggcgtgatcaacgatcaccccggcgtggtcaaccgtctgctatggatgcaggatgcctatggcctgcaagcccatgaccgggtgctgcagaaaaccccgttcagcttcgacgtgtcggtatgggaattcttctggccgctgttcaccggcgcctgcctggtgatggcgcgcccaggcggtcacaaagacccggcgtacctgtgcgaggtgattgccgccgagcagatcaccacgctgcacttcgtgccgtcgatgctcgacgtgttcctggcccatggcgatgtgagccaggcagctggactggtgcgcgtgatgtgcagcggcgaggctttgcccggcagcctggtgcggcgcttcaagcagcaattgccaggcagccaattgcataacctgtatggcccgaccgaagccgctgtggatgtgactgcatggaactgcgccgggccggtgacgccggacaacacaccgatcggcaaaccgatcgccaacacccgcctgtacgtgctcgacgcacagatgcagcccgtgccattgggcgtggtcggcgagctgttcatcggcggcgtgcaagtagcgcgcggttacttgaaccgcccggaactgaccgccgaacgcttcctcaaggacccgttcaccgatggccgcctgtatcgcactggcgacgtaggccgctacctggtggacggcactatcgagtacctggggcgcaacgacgaccaggtgaagatccgtggcctgcgcatcgagctgggggaaatccaggcgcgcctcaccgactacccgcaggtcaatgaagccgcggtgatcgcccgtgacaatcgcctgattgcctactacaccggggcgttcagcgagatcgatgccttgcgcacgcacctgttgcagcacctgccggagttcatggtgccggcgatcttcgtgcatctggagacgctgcccctgagccccaacggcaagctcgaccgtaaggcactgcccgcgccgggcctggactcggtggtggtgcgcgagtacgaagcgccccagggcgacacggaaatcgccctggcctgcctgtgggccgagttgctcaacgtggagcgcgtgggccgtcacgacaacttcttcgagctgggtggccactcgttgctcgccgtgagcctgatggggcgcatgcgccgcctcgggttgtcggcggatgtgaaggtattgttcggccagccgaccttgtcggcgttagccgccgcgttgggcggcgggcgcgaagtggcggtgccggtcaatggcattgctgccgattgcaccgcgatcaccccgggcatgttgccgttgatccagctggaccagccggccatcgagcgtatcgtcgcctgcatcccgggcggcgcggcgaatgtgcaggacatctacccgctggcgccgttgcaggccggcatgctctatcagcatcgcgccgcgcagggcggcgacgactatgtgttgcgggcgcagtttgcgttcgacagcgcccagcgcctggaggcgtttgccctggccttgcaggcggtgatccagcgtcatgacagcctgcgttcgtcgttccactgggacggcctggaagaaccggtgcaggtggtgtggcgcgaggccgcgctgcgggtcgaacgtgggccgatgccggagcggctcgacctgtcccaggcgccgctgatgcgcctggtggtgagtgaagacagtgccaccttgctgttccaccacctggtgatggaccacatcgccctggagattttgcagcacgaaatgcaggcgtttctctcgggcacccaacacaccctgggcgcgccggtgccgtatcgcaactatgtggcccagacccgcttgggggtggacgatcacgaggcgttcttccgcgagatgctgggcgagatcgacgagccgacccgcctggaaacccttggcggcaatgagcaggttcactgtgcccttgacctggcgttgagccaacgcctgcgcacccaggcccgacaatccggggtgagcgccgccagcctgatgcacctggcctgggcgcacgtgctgggcaaggtctcgggccgtgagcaggtggtgttcggcagcgtgatgctcggtcgcctgcaaggtggcgaaggggccgagcgggccatgggggtgttcatcaacaccttgccgctgcgggtcgacctgggtcggcacagcgtgcgcgacgcgttgcatgccacccacgcacgcctcactcaactgctcagccacgagcaggcgccgttggccttggcccagcgctgcagcggcgtgccggtgacgacgccgctgttcgatacgctgttcaactatcgccacagtgcgccgcaggtggcgagcgaggcttggcagggcatccgggtgctcaaggccgaggaacacagcaactatggcctgtcggtgagcgtggatgacctgggcgcgggtttctccttgaaagtcgtggggctgggcgcacgtcgcgtgtgcgactacctgcgcatcgccgtggagcaggtggtgcaggcgttggaacagggcggtacgacggccatcggccacgtgccgatcctgcctgccgccgaacgccagcaattgctcgacctgaacgccaccacccgcgcattcccgcgtgagcatacggtgcaacgtttgttcgaagcccaggcccatgcgcgtcccgcagccatggcggcgctgcatggcgagcaatcactcagttatggcgagctgaacagccgcgccaatcggctggcccatcatctgctgggccttggggtgcgtcccggcgatcacgtggcaatcctgctgccgcgctcgctaaacttgctggtcagccagctggccgtgctcaagtgcgccgccgcttacgtgccgctggatatcaacgctccgaccgagcgccaggcgttcatggtgcaggacagcagcgcggcctggttgttgaccggcagcgacgttgccgtcgactaccccgtgcagcgcctggacctcgacaccctggccctcgacccgcagccgagccataacccggatctgtcgcagtcgtcggacagcgtggcgtacatcatgtacacctccggctccaccggcacgcccaaaggcgtgttggtgccccatcgcggcatcacgcgcctggtgctgaacaacggctatgccgacttcaatgccagcgaccgcgtcgccttcgcctccaacccggcgtttgatgccagcaccatggacgtgtggggcccgttgctcaatggcggccaggtgcaggtgatcgaccatgccaccttgctcgacccggccgccttcggcgtggccttggcggacgcgacggtgctgtttgtcaccaccgcgttgttcaaccagtacgtgcagttgattccccaggccctggcgggcttgcgcatcctgctgtgcggcggcgagcgggccgacccggcggcgttccgcagcctgttggcgcaggcaccggcattgcgcctggtgcattgctacgggccgaccgaaaccaccacctacgccaccacctacgaagtgcggtcgctggccgagacggccgacagcgtgcccattggccgaccgatcgccaacacgcaggtgcatgtgctggacacgcagttgcagccggtgcctgtgggcgtgaccggtgaaatctgcattggcggcgacggggtggccaaggggtacctgaaccgtgctgaattgaccgccgaaaagtttgtgcaggacccgtttatcccaggcgccttgatgtaccgcaccggcgacctcggtcgctggacggcggagggcctgctggaatgcatcgggcgcaatgacgaccaggtgaagatccgtggtttccgtatcgaactgggtgagatcgaagcgcgcctggccggtttcgccggtatccaggaagtggtggtgctggcccgtgaagacgcaccgggtgacaagcgcctggtggcgtatttcacctgggccgatgagcccctcggcatcgacagcgtgcgggcctacctgcaaggccagttgccggactacatgctgccgtcggccttcgtgccgttggagcacctgccgttgaccgccaacggcaaggtcgaccgcaaagccttgccggtgcccgcgctggaagccttgcaccgccgcgagtttgaagcgccggtggatgctctggaacagaccctggcagcgctgtgggccgaggtgctgaagctggaacaggttgggcgccacgacagcttctttgaattgggtgggcactcactgctggcgatccgcctggtcaccctggtggaagacgctgggttgcacctgtccctggccgagctgttccagcacgccagcgtggcctccgttgccgcgctgttgcgccagcgtaccgccgcgccagtgggcgacacgtcggtgatcacggtgcgcggcagtggtgcgcaggcgccgctgttcctggtgcacgagttcagtggcatggacgtgtacttcccggcgctgggccagcacctgccgggtgactacccgatctacggcctgccgggcgtggccctgggcgaaccgcacttgaacaccatggaaggcctggcggcgcggttggtcggcttgattcgcggccttcaaccccatggaccttatcggctggccggctggtcgtttggcggcgtgctggcctatgaagtggcgatgcaactgctggggctggatgaggccgtggagttcctcggcctgatcgacagctacgtgccgcgcatgaccgaccagggcaaggcgcgctggagcgggccggacgcgctcaagcggcatttgctgttgcagtgcacggcgtattggaaagcacagggaggtgcggatgaactggcgagccttgaacacttggaggcagacgttggacagctggactttgcgcgcctgctgcaacgttgtcgcgatgaaggtgtgctgcacgcgcaaatggcggcggcgacggacgcggagctcttgaactatatccagcgcgaagtcggccacgggcatgcgttggcgcactacagcctgttcccgttgccggttccggtgtacctgttcagcgcgggtgagcgcccgactgagttgtcgcggcgcagtgagtcgctgggttggcaagaggtattggcgccggggcaattgcgccaggtacaggtgccgggggaccaccagagcatgatgcaggcgccgcatatccaggcgctcgggcgagcgatgagcgaggtgctaagggcctgttcgccggtggtgcaggcgccgcatcaacccatgttgcgtattcagagcggccgggcggggtatgcgccggtgttctgtgtgccgggtgcgggagacagcgtcaccggctttgtcggcttgggcgaggccctggggcgtgactggccgctgtttggcttgcagccgcgtgggctggacggtgaggcggtgccccatagccaggtggaagcggcggcggcgtgttacttgatggccttggaacaggagtgtgcgcaggggccggtgcatctggtcgggcattcgtttggtggctgggtcgcgctggagatggcgttgcgattgcaagcggccgggcgcgaagtggcgtcgttgacggtgatcgacagtgaggcgcctggtggggccgctaaggtgtacaccacgacggcggcgttgctgcgcttgatcgaggcgatgcagttgtcggccggcaggtcgctggggattgatccgggggattttgccgcgagtgatgaggtggcgcagcggcggcggttacatgccggcatggttggtgtcgggttgttgccggggcgttctgcggtgggtgcgatggaggggccggcgcgcacttatgcggcggcgttgcgtacagagtatcggccgggtgcgcggttcaagggcgtggtgcggttggtgttggcggaggatccggcgctggatgcggcggggaatcagcgggagcaagggttgatggtcgaggggtggcggcggcaggggagtgggttgcaggtttggtatggcggggggaatcactttacgttgctcaaggcgcccaatgtggttgggttggcgcgttggtgggtggatggggtggtggttggggaggtggtttcttgagtggattgtcggtgtacatatccgtcgcgtcggtaacggctagcccggcggcctcagggccgaccggtattgtgtttgtcgttcgcggctcgagtgtgggagggcgcttgcccccgatgacggtgtgtcagttgatgcatctgtggctgtcccactgcaatcgggggcaagccccctcccacagttttatctccatacatcaggtagatatcagcctgcttttgatctgctggtgatctggcgtttgatcccagacgccccgtaaaaccacgctgaccttcgttcgggcacaccgagcccgagtgtttgggcaagagcgttttgcttacttttgcgcttttcaaaagtgagccgccgtaagggcggaaccataagcggccgttacctaaataacggatatgtactcgatcaaaggccacccatggaaaagtcaaagttacgcaaactaggaatgctcacagtcatcacagtcgccatcggcctgatcatctacacggtccaggcccccgccgacgccccccaatacctcaccgccaccgccgaacgcggtgacatcgaaaacgccgtcctcgccaccggcctgctcgaaggcatcaaacaggtcgacgtaggcgcccaggtctccggccaattgaaatccctcaaggtcaaggtcggcgacaaagtgaaaaagggccaatggctcgccgaaatcgacccactggtcctgcaaaacaccttgcgcaaagcccaggtcgacgaagaaaacctccaggcccaacgccgcgccacggcggcccagctcaagcaggccaagtccgtgtacgagcgctacaaaggcctgcagatcgacgagtcggtttcacgccaggattttgaagacgccgagtccaacttccaggtgcaacaggccaacctgctgtccctggatgcgcagatcaaaagcgcccacatccagatcgacactgccaaggtcaacctggcctacacccgcatcgtcgcgcccatcgacggcgatgtggtgggcatcgtcacccaggaaggccagaccgtgatcgccagccagctggcgccggtgctgctcaagctggcggacctggacaccatgaccgtcaaggcccaggtctccgaggcggatgtgattcacatcagccccggccagcaggtgtacttcaccatcctcggtgaagccgacaagcgttactacgccaagctgcgcggcaccgagccggcgccgcagaacttcctggaaacccagaccgccggcacgccaaagcagaacacggcggtgttctataacgcgctgttcgacgtgcccaaccccgatcaccgcttgcgtatcgccatgaccgcccaggtgcgtatcgtgctcgatactgcccaggccgcgttgatggtgccggtggcggcgctcggtgcgcgcaacaacgacggcagctacccgctgcgggtgctggatgccaagggcaaggcggtgtcgcgggatgtgaagaccgggatcaacaacaacgtcaaggtgcagatcctcgacggcctggccgaaggtgacaaagtggtgatcggcgacgcaacccctgctgtggcggggaactgacggatgacccagccactgttggaactcaagggcatcacccgcagtttcatggccggcgagcgtgagttcattgcgctcaagggcatcgacctgacgattcatgccggggaaatggttgcgatcatcggcgcctcgggctcgggtaaatcgaccctgatgaacatcctcggcggcctggattacgccacggccggcagctacaagatcaatggcatcgaaacccgctcattgggcgacgagcaattggccgaactgcgccgtgactacttcggctttatcttccagcgctaccacttgctggcgcacttgagcgctttgcataacgtggagatgccggcgatctacgccggtacatcggaaaccgcgcgccatagccgtgcgcgcgagctgctggcgcgcctggggctggcgggccacaccagccaccgtcccagtcagctgtcgggcgggcagcagcagcgggtgagtattgcccgggcgttgatgaacggcggtgaagtgatcctcgccgacgaacccaccggcgccctcgacacccacagcggcaaggaggtcatgcgtatcctcgctgaactgcacgccgccgggcatacagtgattatcgtgacgcacgaccccaaggtcgcggcgaacgcccagcgcatcgtcgaggtgtgcgatggcgagattgtcagcgacaaggccaatgacagtgtcggcctggagctgcccagcgaaacccccatcgagcctaaacgcagcggcgcccggcgtctggtggcgagcctggggcttttcaaggaggccttcaatatggcctgggtcgcgctggtgtcccatcgcatgcgcaccttgctgaccatgctcggtatcgtcatcggcatcacctcggtggtgtcgatctcggccatcggcgaaggcgccaagcgttatgtgctcaaggacatccaggccatcggcagcaacaccatcgatatcttttccggcaccagtttcggcgacagccgcgcctcggccatcgagaccttgatgccctcggatgtcgacgcgttgaaccagttgtattacgtcgacagcgccacgccggtggtgggccgcaacctgttgctgcgctttggcaatatcgacctggacgcgcaggtcaatggcgtgagtgaccgctatttcaaggtcaaggggctgaagctcgaagcgggtatcgccttcagcgaaagcgatgcacgccgccaggcccaggtggtggtgatcgaccacaacacccgccatcgtctgttcgggccgaacgtcgacccgttgggccaggtgatcctggtgggtaatctgccgtgcacggtgatcggcgtgacggccgacaacaaaaacatgttcgccgccagcaaggcgctgaacgtgtgggtgccctatgaaacggcggcggggcgtttgttggggcaacgtcatctggacagcattactgtgcgcatcaaggacggccaaccgagcaaggtggtcgaagacaacgtcaacaagctgatgctgcaacgccacggcaccaaggatttcttcaccaacaacctcgacagcatcatgcagacggtgcagaaaaccagccgctccctggcactgttgctgtcgttgatcgcggtgatttcactgctggtgggcggtatcggggtgatgaacatcatgctggtgtcggtgaccgagcgcacccgtgagatcggtattcgcatggcggtgggcgcccggcaatcggacattcgccagcagttcctggtggaggcggtgatggtgtgtttgatcggcgggctgatcgggatctcgctgtcctatgccctgggctttctgttttcgttgtttgtgaaggaatgggagatggtgttttccctgggctcggtcatcaccgcgtttgcctgttcgacattgatcggcatcgtgttcggctttgtgccggcgcggaatgcggcgcggctggacccgatcgaggccttggcaagggattgaggcctgcttgccaatgagaacccaatgtgggagggggcttgcccccgattgctgtgtatcagccacaatttatattgctgacccaccgccatcgggggcaagccccctcccacattcagaccggtgtcgtcttaaaaaccagccgtgtcctcggtggcatacatccaccgcaacaacgaatgccgcccgctgatccccaacttgatcgccgcgcgtttcaggtaactctcgatggtgttgaccttcaacgccaattgctccgccaactccggcgccgtgcgcccggccagcaggccgacgcacacttcgagctcacggttggagagggtcagccccgattgcaccaggcgttcctcgatgcgccggcgcagggtttcgaggccctggttttccggggtcaccggttcgctgtccaggcggcacggctggatcgcggcgatgtgtttttcgaccatgggcaacagcagggtggagaagtcctgcagcatgctgcgctcctgcggcgagaaattttcggactggtgtgagcgatacaccgacaacacatagcgcacgtcgtcgcggcggcgggtgaggtgcaattgtgccgcaggttgctcttcgcccaaggcttctaccgagtcggtgtagaccgggctgatcttgcgccggacctgcccttcggcactcagttgcaattgcctgatatgggtggcgtccacggccagttgggtgaggatcaggtcatgcagcatgcgcggaaaatggcggctgccggtgctggcgatgaccttgccaatatggggaaacagctgtgagttcatcaattcgtccatgaggcgtgcaggtattcggccttatagcgacggggattaagaggcatgccaatgcgaataacctgcggtgataatccttcccgccggaacctatgctagtacagcctggcggcgggaaggggatccaatctaaaaaaattggattagacactcacgagtttggacttgtgttgcggcgtgcgcgtgcatttggccagtgcctgctgcatatcggccagcaggtcggcgacgtcctcaaggcccaccgacaaccgcaccagcccttcgctgataccgtgccgggcgcgttgctccggggtgtaggtggagtgggtcatgcttgccgggtgctgggccagtgactcggcgtcgcccaggctgacggcacgggtaaacagcttgagggcattcatgaagcgccggccggtttcgattccgcccttgagttcgaaggcgatcatgccgccgggcattttcatctgccgtgtcgccagttcgtgttgtggaaaagaacgcagccccgggtaagtcacgcgctccacggcggggtgtgcctgcaaggcctcggccaccgcctgggcgttgctgcaatggcggtccatgcgcagggccagggtcttgaggccgcgcatcaacagcgaggcatcctggggcgacatgacggcgccggtcaggtccttgaggccttgcaggcgaatgcgctgggccagcgcctggctgctcacggcaatgcccgcagtgatatcgccgtggccgctcaggtatttggtcgccgaatgcaccaccacatcggcgccgagttccagggggcgttgcaggtagggcgtgcagtaggtgttgtcgaccactacggtgatgtcgggttgctggtgggcgagggcggcgacggcggcgatatccaccagttgcaggttggggttggccggggtttcgcagtagatcatgcgggtcgcggggctgagtgcggcttgcagggccgccaggtcagtgaggtcgacatgccgcaccttgatgccgaactcgccgatgccgtggtgcagcagggcgaaggtgcaaccgtacagcgtctggctgacgatcacctcgtcgccggggcgcagcagggtccagaacgttgcggcaatcgcccccatgccggaactgaacgccaccgccgcctcaccgttttccagggtcgccatgcgtgactccagcagtgccagggtcgggttggaaatgcgcgtatagaagtggccgctggcttcccctgcaaaacaggcggcgccgtattcggcggtggggaaggcaaaggtggcagacaggtaaatcggcgggacgagcgcgccgtggtggtccttggggtcgtagccgtggtggatggcgcgggtggaaaagccgaatgcattgtgtttattgttcatgtcggacgctccttgtttcctacaatgctatgctcataaccacagatgaattttgcgatatttgctgctaattcccgcgtcctgggatgaaaacctcataaaaataacgaatagaggcacgttatgcctgtcagtctggatcgcaccgataaagcgcttttaaacgcgttgcaaggtaatgctcggctcaccgtggctgaattggccgaccgcgtttccctgacgacctccccgtgttggcgccgggtgcgcaacctggaggagagcggggtgatcagtgggtaccaggcgattctctcgcccaaggcgctggggtatggggtgacggcgtttgtcagcatcatgatggagagtcacacccaggacattgcccgggcattcgagcagcggctgttggagattcccgagattgtggcgtgtcataacgtgtcggggcggtatgattttttgttggaagtggtggcgagggatctggagtcgtttggggagtttgcgcgggaggtgttgcagacgttgccttgcgtcaaggagatttattcgagtttttcctataagtcggtgagggggttgcgggtgattccggtgccggggtgattgggtggtgtgttgtgtacatatccgtttcttcggtaacggctacttagggttccgcccttacggcgggtcacttttggaaggaccggaatgccggcccagccaaaagtaagcaaaaggtcctcgccccaacactcggcacctcgcctaggctcggtgtgccctcactccggcttgaatccgtgggccgccgtcatgggccatccctggcccaggacggctaacccggcgtcctgccgggttacccacggattcaagcctgcgttcggccagcgtgtttgacggggcgccccagatcaaaagcaagagcgcggcggccttagagccgaccggattgtatggcccgtactcggtcaaagtgtgggagggggcttgcccccgatggcagtgggtcgtcactgatgagttggctgacacaccgccatcgggggcaagccccc

SEQ ID NO: 81 - DNA, 60495 bp, Pseudomonas nodulensis
gacacgcaactggaaccctatcgggacggtgtacctcaatcccgaaagggagctgacagttgtcgtgaaggtcgcctagcaagacgggagacacgacaactaccttgaaaaacgccgggctctggctctggcctttgatctgcttttgattttgatcttaggcgccccgtcaaacacgctggccggaattcggcagggatttggggggtaaaccggcagggatgccggtttagccgcctcgcgccatggatggcgcgtggcggcggccccccaaatcactgtcgaattacgggcataccgagcctaggcgaggtgccgagtgttggggcaagagcgttttgcttacttttgcgcttttcaaaagtgagccgctgtaagagcggaaccctaagtagccgttacctaaataacggatatgtccccaatccaacccaaccccccccaaacagcacgtacatccaattttccccaccccatcccccctcaaactccctcatcgctgaatcttcaaggcagagggacaccccatggacccaaccacaaaaccaggccccgacgaagtcgtcaccctggtggtcaaacacctcatcaaacccggcctggaggccgactacgaagcctggctgcgccgcatcgtccgcatcgccggcgaccgccccggccacctcggtgtcgacgtggtacgcggaaaacaaggcaacctggcgcttttcacctgtgtattgcgctaccgctccaccgaagacctggaaacctggctcgactcccccgagcgcaaaaccctgatcgccgaagccgcgcccatgctcgccgacggcgacaacaccgaaatcggcgcggtcaacgaattctggttcaaccccgaaaccccaaacgccgccaagccgccgcgctggaagcaggcggtggtcaccctgtgtgtgatcctgccgctgaccctgctggtgccgatcgtgtggggcccggtgctgcgcctgcacccgtttctctccaactacgtggtcgccacgttcctggtgaccgtgaccatagtcgtgctggtggtctacctgctgatgccggcggccacccgcctgttcgctccctggcttgaagcctctgtaaaggaaaccctatgaacgccgatctgattctgttcaatggccagttccacaccgtggaccgtgaaaacccgcgcgccacggctgtcgccatccgcgaggggcggtttgtcgccgtgggtaccgacggtgaagccatggccctgcgcggcagtggcacccaggtcatcgacctcaagggccgaaccgtcatccccggcctcaacgactcgcacctgcacctgatccggggcggcttgaactacaacctcgaactgcgctgggagggcgtgccgtccctggccgatgccctgcgcatgctcaaggaccaggccgaccgcaccccgacgccacaatgggtacgcgtggtagggggctggaacgaattccagttcgccgaaaaacgcatgccgaccctggacgaactcaaccaggccgcgccggacaccccggtgttcgtgctgcacctgtacgaccgcgctttgctcaaccgcgcagcgctgcgtgtggccggctacaccaaggacacgcctaacccgccgggcggcgagattgtgcgggacagcaacggcaaccccaccggcatgctggtggcgcggccgaacgcgatgattctgtattcgaccctggccaaaggcccgaaactgccgttggagtaccaggtcaactcgacccgccagttcatgcgtgaactcaaccgcctgggcctcaccagtgccatcgacgccggcggcggtttccagaactaccccgatgactatgcggtgatcgagcaactggccaaggaccaacagttgacggtgcgcatcgcctacaacctgttcacccagaagcccaaggaagaactcagcgacttcaagaactggaccggcagcgtcaccctgcaccagggcgatgattacctgcgtcataacggcgctggcgagatgctggtgttctcggccgccgacttcgaagacttcctggagccgcgtcccgacctgccgttgaccatggagcaggagctggaaccggtggtgcgccacctggttgaacagcgctggccgttccgtttgcacgccacctataacgagtccatctcgcgcatgctcgatgtgttcgagaaggtcaaccgcgacatcccgttcaacggcctgccgtggtttttcgaccacgccgaaaccatcaccccgcagaacatcgagcgtgtgcgtgccctcggtggcggtattgcgatccaggaccgcatggcgttccagggcgaatattttgtcgagcgctacggcgccaaggccgccgaagccacgccgccgatcaagcgcatgctcgccgaaggcgtgccggtcggcgcgggcaccgatgcaacgcgggtgtcgagctacaacccgtggacctcgctgtactggatggtcagcggccgcaccgtcggtggcctggaactgcatgccgaaggcttgccacgcctgaccgcgctggaactgttcacccacggcagcgcctggttctcgtccgagcagggcaagaagggccagatcaaggtcgggcagttggcggacgtggcggcgctgtcggcggacttcttcagtgtcgatgaagaagccatcaagtggatcgagtcggtcctcaccgtggtcggcggcaaggtggtctacggcgccggcgacttcgaagatttcgcccccccgcgcgtgccggtgctgccggactggtcgccggtggtcaaggtgccagggcactggcgcccaggctcgccgttgcaggcgcaggtgcaccagtgcaacggcccgtgcggcgtgcatgcccacagccacgaaaaagcccgccattccagcgtgccggtcagcgacttccagggtttctggggtgcgttcggctgctcgtgttttgcattttgattacccatacccccgtaaggagttgaaccatggctagccctcgtttgaacaaagatgacgccgttgtactgttggtcgaccaccagactggcctgatttccctggtgcaggatttctcccccaacgaattcaagaacaacgtgttggccctggccgatgtggcgaagttcttcaagttgccaaccatcctcaccaccagtttcgaaagcggccccaacggcccgctggttccggaactcaaggaactgttcccggacgcgccgtatatcgcccgtcctggccagatcaacgcctgggacaacgaagacttcgtcaaggccgtcaaggccaccggccgcaagcagatcatcattgccggtgtggtgacggatgtgtgcgtcgcgttcccgaccctgtgcgcgctggaagaaggctttgaagtgttcgtggtcaccgacgcctccggcaccttcaacgaaaccgtacaacaagccgcctgggcgcgcatgactgccgccggcgcccaactggtgaactggttcgccgtggcctgcgaactgcagcgcgactggcgcaacgacatggaaggcctggccaacctgctgtcgccacgcatccccaactaccgcaacctgatgaacagctactcggcgttcactgccaagtaactggctcaggttattccttgtgggagggggcttgcccccgatgacggtgtgtcagtcacaacttctctgactggcccactgctatcgggggcaagccccctcccacaatttgttttgtggtgtgtccactaacaggctataaatccgagaaatgtccaccgagaagcgacaatgaaccccttcgaagacatgcgcctgttctgccaggtcatggaatccggcagcttcaccgccgccgccgaacagctgggcctgtccaagcagttcgtcagccgccgcctgatccagctggaagaccgcctcggcgtacgcctgctcaaccgctccacccgccggctggatgtcacgccactcggccagagttactacgaatccgccttgcgcctgctcagtgaagtcgagcaagtggagcagggcatcgctggccagaacagcgaaccacgcggcaccattcgcctcagcgcaccgttgtcgtttgccatggcccatctgggctgcctgttaccgcttttcctgcagcgccatccccaggtggcggtggaggtcgacttgagcgaccgtcccgtggacctgatcggtgaaggctacgacctggttttgcgcatcggtaccctggaagattccaccctgatcgcccggcgtatcgccagcattccccgggtgtactgcgccagccccgactacctggccttgcgtggtacaccgcaaaaacccgatgaccttgccgaccacgattgcctgccctacggccacggccgccaggtgcagtggcgcttcaagggcaagttgcaggcgctgagcgtgagcgggcgcatgcgggtgaacaacggcgacttgctgcgcgataccgccatcgccggtctgggcgtaacctacctgccgacctttatcgtcggcgaggcattgaaggacggccgcctggtcacggtgctggatgaattcgcccccgaagacctgacgctgtcggcagtgtacccgcagcaccggcaaagctcgcgaccggtgcaggcgctggtggagttcctgcgcgaacgcctggctagcggctgttgaagagctggcggatcaggttgggcgtactgccggtccagcgcttgaacgaacggcgaaagttcgccgcatcgttgaagttcaggtacgccgccacttcatcattgctatagcccttgacctgatacaggtgcaacgccacctgcttgcgcacgcggtccacctgctgctgaaagccggtgtcatgcttgtgcaacttgcgcttgagggtcgccgggctcatggcgaaggcctgcgcagcctgttccaggctgggcggttggcgtacctgttcgcgcaggtagtcgtagaggcagtcgagaaagctgctggagaagcccagttgttcgatctgcacacgggcttgctggcgtgccacctggccggcggtggccgaggcacctggccaggcgcgggtgaggtattcgcgggggatgctcagcatgtccagcggccgttcgaagcgcgtctcttcgtccagatgcacccaatactgctcgacgtaacgcggctcggcatgactgaaactgcacgcccacggcaggcgctcgccgctgagccattggctcatggcgaccagcgaggtcatgctggcttccagtaaaaaccgccaatgctcgccggcgccgcaactgtctcgccagtacaggtaggcgtggtgcgcatccaactccagttgcagggtggccagtgggctgagcagcacctgttgctggatcaggatctccagggcctggtgcaggttctgcgcatgccccagggcatggctggccgcgccgtagtagccgggcaagagccgctggccgaacagaaaactgctgtcgtcggcgtcaagcaatttgcgactgttgccgatcaacccgaaaaactgctgcgggctcaaccgcgccgtgccggccaggatgtcctcgtgaaacagtcccgtgccgcgcagcaggcgatggctgtcgatgtcccgggacaaggccaggtcgatcagcgtggcgggttggtagtgccctggtatgaagcggctgtcggcttcataccagctggttttcacggccatctcaggcgcttttcgccagaggttgcttggccctggcgagggccaggttgaggcgcttgagcaagtcctggggcggctcgtccagggccatgaccacggcggtggtcgccgccagttgcaggcgctcaccgtgcagtcgggtcttgtgtgcaaggccgcgcactgcctgctgcaactccagcgccagttccttggcctggcgctcaccggtgttgggcagcagtaccacaaaacggtcgccggccaggcggcacagcagatcctggcggcgcaggttgagcaacagcaaatggctgagggcctgcagcaccgcatcgccttcggcatgcccgtaggcctggttgatggccgcgaagttgtccaggtccagcgccagcagcgacagcggttgctgctgggcctggctgtcttgcaggctctcggccagctggcgcttgaggtagtcggcgccggccagcggcgtgagtttgtcgaacagccgatgctcacggaacagtcgctcgcgtttctccatctgtgcgctgatcgccagttgttcgcggtgccagtggtagataccaatggtcagcaggatcatgcccaccggcatcggcccggactccagccagtggtcccaggtaatgctgtcgggcaggcggatgaattcgtcgaggctgtcgatccaccacgagaagaagatgcatgacaggcccagcgccaggtagttggtcacgcgcccggccggtcggcttttcagcaccagccctagccagatcagcgcgagcagggcggaaccgccttcgccgaagatatccagccacacccattcgctgacgcttttcaactcgccgcaggccaggtgcaggatcagccccaggtttgcggcgatcagcagcagggagagtttccagcggtggggtttgagcacggaaaacatggccgcgagtccttgcaaggttcagtcgtgggcgccagcacagcagatggatgtgacggttgcgtgacgcagggcaggggtcgaatcagctcatcccgccgacaatgaaacgcagaaaatgtgggagggggcttgcccccgatagcggtgggtcagtgaaaaatcagggggctgatccactgctatcgggggcaagccccctcccacagttgatcttcacaggtcatttcagctcattccaactcaagatcctgctcaagcccccggtttacggggctccccgccactcgctgtcacagaacggtcatcccccacccctagcgtgccctcccagttgccgggcctcttgcctggcgccaacggactcttggggaggattgcatgtacaagcgcaccgggctcgtcagcttcacgcttactgccttggccctggcgattgccagcgagcgactcaacgcggccgaagtggccaacgccgagcacgtcgaagtggtcggccaggcagcggccatcgaccaggcgctcaaggagcaacgcaattcggacagcatcaagagcgtgatacatgccgacggcgtggcccagttgccggatgaaaacgtcgccgaagcggcgcagcgcctgccgggcatcagcgtggagcgcgaccagggcgaagggcgctttgtcagcgtgcgtggcctgggcccggacctcaacagcgtgaccatcaacggcaccctggtacccgccccggagagcgctcgccgcgcggtggccctcgatgtgctgcccgcggagctggtgcagtcgctgtcggtgatcaagaccctcaccccggacatggacgccaactccctcggcggcacggtggatgtgcaaagcctgtcggcgttcgaccacaagggcctgttctacaccggcagcaccgaagccagttacgacaagaacacccatcagaccagccccaaattctccggcgcggccagcaaccgtttcagtcttggcgacggcatcgacaatttcggcgtggccgctgcactgagctggcagaagcgcgacttcggctcggacaacgtcgagaccggtggcgcctgggacttcaccgacggtgctcgactcaacgagttcgaacagcgtgactacgacatcagccgcgaacgtgccggtggcggcctgaacttcgactacaagcccgacgacctcagcagctactacctgcgcaccctctacagccgctacaaagacaccgaaacccgcaactccaccagtctcgaattcgccgacccgcaggcccccggccagctgggcgatgccgagggcaagcgcaagctgaagaaccgcgaagagacccagcaaatccagtcctacgtgttcggcggcgaacgcatgctcggcctgtggaccctgagcggccaggccggctacagccaatccagcgaagacagcccggcacacatcgccggtgccaccttcgacggcggcgactttgccaacagcggtttccatgacaagggcaagccacgcccgatcatcggcagcggcttctacgacgcgcgtaacttcagcctcgacaaagtcgactgggaaaaacagaacacccaggacaccgagaaaaacctgcgcctggacctggcccgcgactacgacctgagcggctatgcgtcccaggtcaaattcggcggcaaggtcagccgccgcaacaaggacaacgatctggaagcctgggtctacaaagacttcgacaccctcggcttcactgccgaccagctcaacctcacccagttccagaagggcaacgtcgactaccgcctgggcaattacggccccggcatcagccccagcgcgatcaagcagctgatcggcagcctcaacccggcggacttctatgacgagaccgaatcgcgggtcaacgacttcaccattcgcgaggacatcaacgctggctacctgatgaacactgtcgatattgacgactggcgcttcatcgccgggctgcgttacgaaggcactgagttcgaagccaagggcaccggcgccaccgatggcgtgttcaccccgaccgacacccagcgtcgctatcaccattggctgccgggcctgcatgcgcgctaccagatcgacaagaacacccaggtgcgcgcggcctggaccaagtccgtggtgcgcccgacctttggccagttggcgccgggcttcgtgatcgacgatgacgaagccaccttcggcaacccggacctcaagcccctggagtcgagcaacctggacctgggcatcgaacacttcatgggccgcgccggcaccgtctcggcgttcgtgttctacaaggacatcaagaatttcgtctacaacactgacctggccggcaccggcgcctggaccaacttcgccgaggcccacacctacgccaacggcgacagcgccaagctctacggcctggaactggcctactcacagaaattcgactggctgcccgcgccgtggaacggactgctgatcggtgccaacagcacgttcagccgctccagcgccgacatcgaaggtttcgacagtgccagtggcacgaaccgcaagcgcaacatcagcctgcccaaccagtccgacaccgtcggcaacctgatgctcggttgggaagacgacacgctcagcttgcgcctgtcggccaactacaaatcggcctacctctacgagttggcctcgatcaacgacaaggcccacgacctgcatgtggacgcgcagacgtttgtcgacttcagcgcgcgctactcgctgaccaagaacctgcaagtcagcttcgaagcgcagaacctcaccgatgagtcgtacttcgtctacaccggccaccgcagctacaacggccaatatgaagagtacggcccgacctacaagctgggcctgaccttcacccacttctaacccacacctcgattccattgtttttgacggattgacccgtacatgaagatttccaagctgtacctgctaatggccttgaccctctgtgcaccggcaatggccacggacctggtcctgaccccttgggcacccagcctcaatgccgaggccatggccgtgctgagcagcaccgaacgcctcaccgccagtacccgcaacggcctgcaactgctcgacgccaaaggcaccgaactcgcccgcttcaacggcaacttcagcagcctcgacacccgcgctgccggctcccaggtactgctcgccagcctcgacaacgaccgccagcaagccatgctgatcaacctcgacgcgtccgccaaaacctttggcaaaccgctgtacctgcccacccgtgactacccggtaaacggcctgtgcctctaccgtgacggcgccgccaacctgtttgtgttcctggtgggcgaagagggcaagggtgagcagtggctggtgggcaacggctcgacgctgctcggcgacccccagcgtgtacgcggtttgccgttgccgccgtcggcgcagttctgccaggtggatgacacaacccaacagctggtggtgaatgaagcaaacgtcggctggtgggcctacccggcgcacccggaagccgaggtcgagcgcacgccggtagcgctgttcgacaaccccaagcgtgaagcgggcgccatggcgctcgtgccgggcgggatggtcgccctcgatccgaagacggcccaggtgcacctgttccagcacaccggcacgcgttgggtcgagcaatcgagcctgacgctgccaggcctcaaggaaccggaacaactcagcgtcaacggccagcaactgctggtgcgcgacgacgacaccggcaggctttaccagggcacgctcaactggaaagccaaacccgtgacgaccgaaccggtggtgccggaagtcgctgcggtgcgccagaccgacccggtcggtcgccagggcgatgcggcggacgacccggcgatctggattcaccccgcgcaaccggaaaaaagccgcgtgctcggcaccaacaagaagcagggcctgctggcctacgaccttgacggcaagctgttgcaggaactggcggtgggccgtctcaacaacgtcgacgtacgccccaacttcaagctcggtgcgcagactgtcgacctggccgtggcgagcaatcgcgatcacaacagcctgagcctgttcagcatcgaccgccagagcggcgaactgcgcgaagccggtgaagtaccgacgccgctcaaggagatctacggcatctgcctgttccagcccgccagtggcgagctctacgcgatcgccaacggcaaggacggcaccttcctgcaataccgcctcagcgcgccggatggccgggtgcagggcgagttggtgcgccagttcaaggtcgacagccagcccgagggttgcgtggccgacgaccagcgccagcgcctgtttatcggtgaagaagacgtcggcgtgtgggcagtggatgcccgcgccgaccagccggccacgcttgccagcgtgatcaaggtcggcccgcagttgcacgcggatgtcgagggcctggcgttgtaccagagcaaccagcgcgactacctggtgatctccagccagggcaatgacagctacctggtgctggatgccgagccgccgttcgccagccacggatccttccgcgtcggcctgaatgcggcggccgggatcgacggggcttcggaaaccgatggcctggaagtcaccgccctcaaccttggcgggccgtggagccaaggcatgctggtggtgcaggacgggcgcaagcgcatgcccgagcagacccagaacttcaagttcgtgccgtgggccgaggtgacccgcgcgctgaaattgccctgagccgtcatcacccggtcatcacttttttatcgaataggagcttcaccatgcacgcgacgatggaacatatgacgatctggggcttgatcagcgacgccagcctgttggtcaaggcggtgatggtcaccttgctgctggcctccttactcagttggtacctgatcatccagcgcgccagtgtgctgcggcgcctggagcgccagttgaatggctttgtgcagcgctttcgtgccgcgcccgacttgcaacccctgtaccgcgacaccgtgcaggcaggcgagggcggtattgcgccgatcttcattgccggggtccaggagtaccagcacctgcacagccatgatccagcggtgctggaaggtgtagagcgcgccttgcaggtggcgatcaccgagcaggaaatcgagttggaaaagggcctgcaattcctcgcaacggtgggttcggtcagcccctacatcggcctgttcggcaccgtatggggcatcatgaattcgttcatcggcctgtcccaggtgcaacaggccaccttgtccaccgtggcgccgggcatcgccgaagcgctgatcgccacggccatcggcctgttcgcggccattccggcggtgatcgcctacaaccgcttcgcggcacgcggccagaccttgctcacccgttactacgccttcggcaatgagctgcaagtacgcctgcaccgcacgctgcgcggcacgtcgagccacctggccgtggccgcctgaacaggagcgatctcatgttagcaaggccgcaacgcaagcacgggcccaaggccgagatgaacgtggtgccctatatcgacgtgatgctggtgctgctggtgatcttcatggttaccgcgccgatgctcacccagggcgtgaagatcgagttgcccaaggtcgccgccgaggcactggccaccgacacccgccagcagatcctcacgctgtcggtgaaggccgatggtggctactactggaacctcggcggtgaactcgacacccaacaccagaccgacagcgccgtgaccctcgacgaaatgggcgccaaggtcatgcaggtggtggcggcgcgcagcgacacccaggtgtacatccgcgccgacgataacgccggttatggccgtgtggtcgcggccatggcggtgttgcagaagggcggggtgagcaacctggggctggtgaccgaggccccgcaatgacggcgatgatcatgcacagtccgacgctgacgatgccttcccgggggccttccgggttctggcgaaacagcttggcggccagcctggcggtggcgctgcatgtgggcgtgctggctgcgctgatgcttggctggtcgacggaaaaaccgccggtggaagcccccagggtgatgcatacccagttggtgatgctgccggctgcacctgcgccggctcccgcacctgaaccggtggctgtcacgcccccggaaccggtcgcggttcccgtaccggtgaagcccacggtcgatccgcagatccaggcgcgcaaactcgaacaggccgccttggcgcgcaagcgcgtcgaggaaaagcagcgggagcagcaacagcaacggttggccactgaacagcgcaaccgtgagcaggcacaacagcgtgctgaccagcagcgccaggtcgctgaaacagcaagagctgcaacacccgctgcggcgccggcgttcgacagccgccagtaccagcccttgagcaaggaggcgccggactaccccgagcgcgccctggacaagcacatcgaaggcgattgttcggtggaatacaccgtcaacacccagggccgcgtggaaaaccccagggtgctggacggctgccacccgctgttcatgcggccttcactggcggcggcgaataccttccgctaccagcccaggatcgtcgatggcaaggcggtgccggtgccggcggtgcgcaataccttccactaccgcatccagtagccggcgatcaattggcacggttgtacagctcaacactggcaacataccgctgcaggttcgccaggaacgtatcggcaatttcctccttgctctgggtggaaattgccgaggtatgcggcgacagcctaacccgcggacgggtgtacaacgcatgcccgtccggcagcggctccggctcggtcacatccagcgacgccaagccaacctgcccattgtccagcgcctccagcaatgcttcctgatccagcaagccaccgcgtgcgatgctgatcaggtgcaaacccggccaggcgctggcggagcacctcgttgtaatcctcgtccagctggctggcgataaccacctggctcatgtgcgctccttgtggcgttgggcgaaggcagccttgccgacaccttgtaataccgcgtcgttctgcggggtatgcacgcggctgcacagcacgtcgcggtagtgccgttgcagcgggctatggcgcgacaggcccgggttgcccgaggcctcgatggccagctccacggcacggatcgcgttgttggttaccaggtacttcaattgcgcggcgttggcggccggggtgtggccttcggcagcagcgtcgagcaggctgcgattggcaaacagcagggtgtcgatatggccgacggtttcctggaaacgcggcagggtcgacagcgccgcaccgagattggacggttggcgctcctccagccagttcaccagccagtcccgggcggcctgggccacggcgtcatacaccgacgacagcagcaccgacatccacaggaaaccctcggggtccaattctggcgacggcgcactccacgggctgacgctgacggcgtggtccagcggcaccagcacgttgtcgagcaccacttcatggctacaggtggcgcgcatgcccaggtggtcccaggtgtcgatgatactcacgccggggctgtccttgggcaccagccaggcgcccaccagcgggtcggcgtcgtcactgcggccccacacgctgaaccagctcaggccgtggctgccggtggagtagatcttgcgtccgctgatgcgccagccctcggcggtgcgcacggcggtggtcgccggcagcccgccacgggccggggtgccgaggtcgggctcgacgcgcagggcgttgatcaatgcgccgttgcgcaccgcgtcttcggccacttgcctgcgcaggtgcgcgggccaggtcttgctgtcttgcaggcgggtgtgttgcaggtactgcatcaccaggatcagtgcggtggacggctcgcccttggcaatcgcactgatcgccttgcgtgcctgggacaggctggccccgccgccgcccagcgccttgggcacggtgagggcgagcaggccgtgttcgtgcagcaacttgaagttggcgtgagggaaagcgccgctctcgtcgtagacttgcgcggtactggcgaactcggtggtgagacgttcgagcagggcgtcgaactgggcgacttccacggagcgcaaggagggctgcgaggatgggctcatgccagcgcctcttgctgcgcttcaacctcggcggcgacgctgtagcggttcaccggcacgtccaggccgaggttgtcacgcagggtctggccgctgtattcgctgcggaacaggccgcgctgttgcaacaccggcaccaccagttcggtgaagtactgcaagccatccggcagcaccgagttgatgatgaaaccgtcactggcgccgtgctcgaaccaggtctggatcgcgtcggcgacctgttccggggtgccgacgaaatcgcgcttgggtcgcgagaaacgcagggccacttcgcgcagggtcaggccttcgtccctggccagttgcttgatgcggtcggagccgcctttctggctgttggaccccaggtcccccagttccgggaacggcgcgtcgagcgggtattggctgaaatcgtggtcgttgaacgggcgaccgagggcgacgatggcatcttccacggtgaccagctccacggcctgctggtagcgactttccacttcagcttcatcgcggccgacaatcgggcggatgcccggcaggatcgacaggttttgcgggtcgcggccaaagcctttggcgcggcgtttcaggtcttgggtatacgccaggccctcctcgatgctgtccacgtgcacaaagatcgcatccgacttctgcgccgcgaagttgcgcccgtcctccgaggtgccggcctggaaaatcaccggttggccctggcgcgaacgcgcgatgttcagcgggcctttgaccgagaagaagtcgcccttgtggttgagtgcatgcagcttgcccggggcgaaaaattcgccggactgtttgttgtaggtaaaggcgtcgtcttcccacgaatcccacaggccctgcacggtgcttacgtgttccttagcgatgcggtaacgcacagcgtggggcgggtgctcggccttgctgaagttgtcggcggtgccgctgagccatgaggtgaccacgttccagccggcacgaccgccgctgatatggtccagggacgcgaactggcgcgccacctggtagggctcggtgtagctgacggtcaccgtggcgacgaggccgatatgtgtggtgatggcggcgagtgccgacaggatagtcagcggttcgaaacggttgaggtagtgcgggctggacttggcgtggatgtgcaggctgtcggcgatgaacacgaagtcgaacttggcggcttcggccaattcagtctgctgcttgtagaagccgaagctggtgctggcatttggttgggcctgcgggtggcgccattcgccccagccgtgaccgacgccatggaccatggctcccagtttcaaatgacgtggcttgctcatgtgctgctccttttagcgcgaggcttggttgaaggggacacgcttggcgttgaagctcttgtcgaagccctgcgacacgtcgatgtgcttgagcagcaggccttcctgttgataggtgtcggcggtcgcttgcaggccgctgatcactgcgtcgtcgatcgtgaccgggttcaggcgggtgtccttggctaccgtcacgtgcacgtccagcggcaggccggtgatcctggcctgggcggcggcgtattcatcggggtgggtattggcccaggcataggcgcggtcaacgcgggcgacaaagtcgtcgagctgcgggcgcttgtcggcgatggcctggctggtggcggcgaggtacaggtggttgctcaacagttggttgccgctgatcagcacgcgggcctggctttgcgaggtgaccacggtggtgtacgggtcccaggtggcccaggcatcggcggtgccgttatccagcaccaggcgtgattcgctgggcagcaggaaaatgaactgcacatccttggtcgtcaggccggcggtggccagggccttgatcgccaggtaatggccgatggaaccgcgcccggtgacgatcttcttgcccttgaggtcggcaacggtcttgatcggcgagtccttgggcacgaccagggcggtggtggtgcgcccttcggagtggatgatgctgaccaccttgagggaagcaccggcaccgagggcgaacacgtacggcgcatcaccgagggcgccgatgtccacggcaccggcgttgagtgcttcgcccaacggtgaggcagatgggaattccgaccactggattgtgtaaggcacgttttggctttcgccagaggcttccagtagcgccttgattgtcgatttctggtttgccacccgcagcggttgcaggtcggcggcagcggcgctgccgatcaggccaagggcgagggcggtgcccaggagcaggcgtttgaaagggcggttgtcgagcatggggcaaactccaggcgtttggtgtctttcaagggatacctccgcctggagaaggggtcggattccatcgcatgtacggggtgggtcagatcacatggaaaccgtgggtgccgtcgcgtgccaactggtcgaccaggccgaattcccagtccaaataggcttgcatggcttccctggggttgtcggtgccttcgtacgggcggcggtagcggtcgatacgcggcgaggccaggtgggtttcgcctgcttccagcggcagttgcgcgttgatccagccggcagtgccgtcctgcagcaggaacacctgcttgccggtgagggtttcgacttcagccaccgccaggcgcgccagttggctgctgccgcaggtcagcacgtaacgctgggcggcgggcaccttggccagggcctcggcgagttgtgcacgcagtacccaccaggctccggggatatggcgcttcacgtagttggcgctggcggtgaaatccagcaccacagtgtcgccgtgggagagccagtcgacgagggtatgggggctgatcagttcggcctggggcggcgccggtaccggcgcgacccaggcgccttgctcgctgaagtgcgccgcttgcaggtcatccagcacgtgcacttcccagcccaactgggccagccaggacgcggacatgtttgcgcgcacaccgtcgtcatctgccagtaccagccgggcaccgcgcacgctggcgaagtgatcggtttcctgcaccagttgcccgcccggtgtggagcgtgcgcccggcaagtgcccggcttcgaattcttccggggtgcgcacatcgaacaggtaggtggtgcgtgtggtttgctgctgccaggtgcgcaggtcgctcagggtggcacggccaacgcgggccttgtcggcgacacgccgcgcatccacggctgcgatctggcggtgctcctcggaggtcggcgcaaaacgccgcgattggccatgggcaagcttctgcccggccagggtccagccgatggtgccgttacgcagggccgacaccgggttggcaacgccggcattgatcagcgattgggtgccgataatgctgcgggtacgcccggcgcagttgacgatgatgcgggtggccgggtccggcgccagttcgcgggcgcgcaacaccagttcggcccccggcacgctgatgccggtgggaatgctcatggtctggtattcgtcgaaacgccgggcgtcgagcaccactacgtcggcctggctgtcgagcagcgcctgcacctcttcagcggccagggacggcgtatggcgttcgctttccaccagttcgccgaacgccttgctcggtacgttgacgtcgatgaacagctcgccaccggccttgcgccaaccgtccaggccgccttcaagcaggctgacctgggtgtagcccaaggcaaccaggcgttcggcagcgcgggcagccaggccttcaccattgtcatacacggtgacctgggtatcgcgccgcggaatgcgcgcatacacctccagttccagcttggacagcgggatgttcgcggcaaacagtggatgggattcggcgaacggcgcttcttcgcgcacatcgatcagggcgacttcttcttggtccaacagggcttggcgaatccgcgcaaagctgcgggtggagagggtggtcatagggcagggctcttttctttggacaaatcccagatattcgggaggaaggcgttggaataaccggagataaacagtttctcgctgccatcgggctggtacaccgcgcggcgcaccgcaccgatattggcgccgtacacatggatgctgatggacacctggtcgctgtgggcgttgctcacctgatggatgtcaccgaccctgggcgacaccgcttcaacctggcccggcaccagctggatcggcttgccttcggccaccaggcggccgtcaggggcgcgttcaaacccttgggaaaactctgagccgcgcagcatgccaatcaggccccacacccggtggtcatggatgggtgtgctttgccccggcccccacacaaagctgacgatgctgaaacgctggcgtgagtcggcatgcagcaggaactgctggtagcgttcgtgatcgggttgggcgaattcgtcgggaagccagtcgtcatggctgaccagttgcgccagcagcttgccgccacggtgtagcaggtcgccttcgcgtgggttgccgtcgatcaattccgccagggcgcctatgaaggctctgagtctctcggggtgtcgggcctgggtcatgacagttccatcgtgcggtcggtggtgatgggtttatctaagcataatgttaatagttaatatgctattttttaatgattagcttatagctgaaggtaatttagaactggtctgaatagcgttagacgttatcgatcacagcgcgggctattcaggcagctttcctgcaactatgcttcgcacacatcttaatgacggttctctatgtgcggcccaaatgaaaattgacgatatcgatgcctttgtcgaagtgattcgttgccagtccatcagccacgccgccgagtcgttgcaactgacccagccggccattacccgtcgcgtgcagaacttcgagcaggcgttgggggtggagttgttcgaccgcaacaccaaacccctcaagcccacgctgatcggcacccgcgtctacgagcagtgccgcttgatcctgcgcgagatggacgccttgcgcgaactggtggccaccgatgcaccacccactggcctgttgcgcctgggggtgccgcagaccatcggcgatgtggtgttgctggatgcgctcaagcacctgcgcaccgaataccctgacctgcgcgcccaggtcgctacggggtggggcagccaactggtgggcaaaatcgaacgcggtgagctggatgcggcggcggcgctgttcccggcgggcaagatcttcccggacaacatcgtcggcgagtccatcggcaagatggaactggtggtggtgtgcgccaaggcccagttgccgaagaaaccttgcaagctggcggatgtgtaccagaacggctggattctcaacccggacggctgcggcttccgtgcgggcttgcagcggaccttgtccgatcagggccttgcgctgcgggtcaacctggaaaccttcggcaccgagctgcaattgggcctggtggcggacggcctgggcctggggctggtgccgcgcccactgctggaacgcagcgcccatcgcgagcacctggcggtgatgccgctcaaggacttcaagccggtgatggacctgtggctgatctacccgcacttcctgggcaacctgcaagggccggtggatgcgtttggcaagctggtggctgcctcgttgcacaggatcaaggacgctgcctgatatgaaaaaaaataataattagcttagattaaaatgtgctttttattatttttttgcatcccctaggcttgcctggaagtccttaaggccatccaggaagttttgccatgagtagcgtcaccccgatttccagcgtttccagcaacaccgtccgccaacgcgttactccgcaagaatgggacgtgcgcgtcaagctggccgccgcctatcgcctggcggccttgtacaaatggaccgaccatatctatacccacttctccgcccgcgtgccggggccggaggagcatttcctgatcaacgccttcggcttgctgttcgatgaaatcagtgcgtccaacctggtcaaagtcgacctcgacggcaccatcgtggatgacccgacgggcctgggcatcaactacgccggctatgtgatccacagcgccatccacggcgcgcgtcacgacctgcaagcggtgctgcatacccatacccgcgacggcatcgcggtgtcggcgcaaaaagacggcttgttgccgatctcccagcattccatcggtttttccgggcgcgtggcctatcacggttatgaagggattgccctcgaccttgacgagcgcgagcgcttggtcgcggacctgggcgacaaaagcgtgatgatcctgcgcaatcatgggttgttgaccgcgggggtcagcgtggagcatgcgtttcagcaactgcagcaacttgagcgggcctgcaatatccaggtcgcagcgcaggcagcggggaatgcggagttgatcttcccgccgcaggaagtggtggagaaagtcgagcaacaggccaaggcgcacgccagcggcgaaggtccgggcgtggcgcggcattggaatgcgctgatccggcagttggagcgcagcgataccgactacaaaaactgagcttaatgtgggagggggcaagcctcctcccacattggtttttgtgttgtgctcaggcgacttgtttggcctgttcgcgttgtgcgatcagttggcgggtgagggggatcaggcgcttgccgtagtcaatcgcatcattcagcggatcaaatccacgaatcaggaacgtggtgatccccaggtcgtaataatccaccaaggcctccgcgacctgctctgcggtgccgaccagcgaggtggagttgccctgtgcaccgagcaacccggcaattccggtccacaagcgcttatccaggcgtgagccttgcgccgctgcagcgagcaagcggcgcgagccttcgttgggcggttcacgccgtacaaagccatttttctcggccagctcggtggcttgctgcaagatcctgtcggcccgtgcccacgccagctcttcggtctcggcgaggatcggccgcaacgacaagctgaagcgaatcgtgcgcccatgcctggctgcttcggcgcgtacctgggtgacgatctcgcgcacctgctcgtaggtttcgccccacagcgcatacacgtcggcatgcttgcccgccacttcaatcgccgctttggacgagccgccgaaatacagcgggatatgcggctgctgtggcgacttcaccgtggagtacgcaccttcgacctgatagtaggtgcccttgaagtcgaagggctgctcgctggtccattcctggcgcaccacgctcaggtattcgtcggtgcgggcgtagcgttcgtccttgccgatatggctgccatcggcgcgcagttcacggtcgtcgccgccggtgatgatgtgcaccgctgtacgcccgccgttgaacacatcgagggtggtgaattggcgcgcggccagggtgggctgggcgaaaccggggcggtgggcgatgagaaattgcagtctggtggtcacgctggcggcgtgggaggcgatcagcgtgctgtccgggctgttggagtggaaggccaccagggcgcggtcgaaaccggcgtcttcgtgggcgcgggcaacgctctcgacgtagtcgggttgcagggtagggccgctgcgcggatggatctcggaagcgtgatggccgccaatgtagccgatgaattcgatgctcatggtctgtccttgtcttgggtgtgattaccacctccaccgggcagggggtcggttattcgcgtccaaagtaggggcaggggcggggtctgtaaaatgccgattggttctaacctaattattaaaatgtggaattattaaattggctgtgtatcagtaaattgcatttttagaatgccagggcgaatcacccgctggcttttcatgtgccgaggctgactttagataacgttgtattttccctggcactgaggtctgatgggcgccgaaacgggcttgccggattggggaactatgcgggcagaacttgcgcaatatggcggcattaccgtcatgattccggccgctatcatcatcgccgtgtggttgcggtattccaaccctcgggcactgagggcctggatcataacggttggtgtggcttattcagtggtcgcgctcagcaagttgctgttcaagggctggggcctgtcatttcagcacttggacattgccgtcatcagcggccatgccatgaatacctgcctgatgcttaccgtggcgctgagcctggtggcccgccagttcaatccggcattgcgctggccggcggcaggtgcggggttactcgccagtgcctggtttggtgcttactgtgttgcgccgtacatacatccactcaatgaagcactggccggtgtcaccgtgggggctgtcgcggcgattgcctttctctggcgcattgagaccacccacgtcagggtgtccccttcgttcatcggcggtgggctggtggtgttgctggcctgcacactggtgcccaagttcaatgccgagttgctgctcaaccgggttgccatcaccttgtcgggtgccgaccaggcccatcaagcgccttcctggcggctggatgcggcacacacaaaggccgagtaagtcaccaggtccagcgcccggtggctgtccaccatcagttccagcaacaccgtctgcgcattgaaacgccgcatatcgccgcgccgccgtgcctcgttcatctgcttgagcagcgtatgggtgatctgctgcggtgagctgccgtgcagttgctccagccaacggccgatggcctgggtattgcgccggtattgggtacccactggcggcttggcgaaaccttcgaacatcccggtgagtcttctcagcgcatagctgcgtatcacgtcatccaacaggctcatggccgctcctcagtgccgcagatgttcgccagcagctcggcggtcttgaccagcatgaactggctgtcaccgcgactttccacgcacaggcacaccgacagcgcatcactcacctgcaacttgaagcgccaatcggcgaacaccatcgacagtccggaacaggattcatcgctgtccagggaattgtcgcggtataacacctgcatgcgctcgacgacgcgggtcgagttattcacttcgacatgaatatttcccgaagaaggaaataggccaatacgctctaccaataactttgacatgttcatggccgtctcttcgttgttgcggtcaggcggcactttattctgtgggagggcaaaagtactggaatgttatttttagtcggttatgccgggtgttgttatttttagtctgcctcggcaggtggtcgaagtaccgcggttgtgatcataatcgcctcgctgcttgaagtaaggtcatcccttttactaccgggttaatacagtcggcgcgtgggaggttgccttgttcaataggattttgattgtgtgtgtcggcaatatttgtcgcagccccacggcagaacaattactgcgcaatgcgctggcgcactccgcgatagaagtgagttctgcggggttggccgcattgcgtgacagcccgctggagcccacggctctgcgggtgctggaagagcacgggcatgcaccggcttcacacagggcacgtcaactgacaagcgctgcggtgagtgacgcggatcttgtactcgtgatggagcaacggcatatcgacggggtactcagcctcgcgccggaagcacggggcaaagtgttcctgctaggtaaatggcaatacaaccgcgagatcatggacccttatcgtcaaggcaaaccagcctttgttcatgcctatgcgttgatagaacaagcggctcaggcgtgggcgcaaaggttagtcggtaaagttggttaaaagtcgtcatgtaacacacttgataagttctgcgttaatcgtgcatggagccgggcgtcttgcaccctgtgccattccttgactattggttggaaaaaagaactgacttatgcaatcaacacccgcaacagcgtcgcataacggcgaagaaactgatctggatttcatgatgttgttgggcacgttgctcgatcacaaatggctgatcggtggcatcagtatcgtctttatggcgctgggcgtggcctatgccgtgttgacgcctccggtctatcaagccaccgcactgattcaggtcgaaccgaaaaaaggcgacatgctcggcttttccgatgtcggcagcctgctcggcaaggagtcgcccacggtcacggaggtcgagttgatccgctcacggatcaccgttggcactgccgtcgacaacctgaacctggacctcgaagtgaagcccaagcgcttccccttgatcggtgatttcatggcgcgtcgcttcaagccagcgcaagcccatgaggtggcgaacccctggctcggcctcgacagttacggttggggtggcgaggccctgaagttttcgcggttgcgccttccggctgacttgctgggccaggaactgaccttgactgccggtagtggcagcacctttaccctgtcggaccaggaccaaaacgtgttgctgacggggcaggttggtcgcttctatgaaagcagcggcctccaactgcaggtcgaaacgctggatgccaaccctggcgcgcaattcagcgttgtgcgttcgccacgcctcaccagcattctgcgctatcagaagctgctggatgtggcagagcgcggcaaggagtcggggatcattggcctggcgctggaaagcacgcggcccgaggcggccattcaggtactcaatgaggtcgcccgtatctacgtgcgccagaacatcgagcgcacctccgccgaggcggcccagagcctggccttcctcaaagaccaattgccccaggtgcgcaaggatgtcgagcaggctgagacggcgctgaaccagtttcagatccgcaacaaaaccatcgacatcagccttgaggccaaggccattcttgaccagatcgtggcgctggatgcgagcatttccgagctcaagatgcagcaggcagagatcgagcgaaagttcaccccccagcacccggtgtaccgcgcgctcctgacgcaactggcagaactcacggcccgtcagagcgagctggccaagaaggtcgaaagcctgccgaccacccagcaagagttgctgagcctgacccgcgacctcaaggtcagcaccgagatctacacgcaattgctcaacaagtatcaggagttggatgtgatgcgcgccggcaccgtcggtaacgtgcgcttgatcgataccgccgatgtcgacctgaggaacccggtcaggccgcaaaaagcattgatcgtggtgatcgccacgctgctcggtgcctttgttgcagtcgcgctggtgctgtttcgcaaggcgctcaatcggggcgtgtccaaccccaacgagttggaaaaactcggtttgccggtgtatgcggccatcccgttcagtgccattcagaaggacatggaccagaagctctttcgcagcaacaagttgggctccacacagttgctggccctcagcaacccaacggacctggccattgaagggctgcgcagcctgcgcacgagtctgcatttcgccatgttggaagcgggcaacaaccgcttgatgatctccgggccgagcccgcaggtgggcaagacattcgtctcggcgaacctggccgctgtggtcgcgcattcggggcagcgtgtgttgttggtggacgtggacatgcgcaagggttacttgcacaaagtctttggcgttgcggcagaaaacggtctgtccgacctgctcgccaaacgctgcgagctcaccactgcgatccatcccacggaggtcgagaaccttcacgtccttagccgtgggcggatcccgccgaacccatcggaactgctgatgcacgccaacttcagcgaattcctggaacaggtcagcgcgctgtacgacctggtgattctggatacaccgccattcctggcggtcaccgatgcaaccatcgtcgggcggcagtccggcaccaatctgatcgtggcccgtttcgagttgaactctgtgcgcgaggtggagctgacgatgcgtcgctatcaacagaacggcattgaactcaaaggcgcaattttcaacggtatcgagaagcgctcatccgccaaatacggatacggcgcctacagctattaccactacgagtacaagtcagacagcgtttgatcctggacgccaggcatttgaagtccaacgcgcaacacgtctaccactggccgcaggttcaacgagaaacgctatgaaagtcacagtttttggcattggttatgtagggctggtccagggcgccgtccttgctgaagtcggccacgatgtgctgtgtgtcgatattgatgcgcagcgggttgagcgtctcaaacaggggcatatcccgatctacgaaccgggcctggaggcgcttgtcagggaaaaccatggggccggccgcttgaatttcaccaccgacgccgtggctgcagtcaagcatggcgaagtgcagtttatcgcggtggggacaccgcctgatgaagacggctcggccgacttgaagtacgtgctggcggtggccgagaccattgggcagcacatgctggccccgctgaccatcatcgacaaatccaccgttcccgtgggcaccgccgacaaagtcagtgcacgggtggctgccatgctcgcgctgcgcgagcgcaccgacctggccttcgacgtggtgtccaacccggagtttctcaaggaaggctgcgcggtggcggactgcatccgtccggaccgcattgtcatcggcaccgccagccggcatgcggaggcggtgatgcgcgagctctacgcgccgttcaaccgcaaccacgaaaaaatcatcgtgatggatgtgcgcagcgccgagttgaccaaatacgctgccaattgcctgctcgccaccaagatcagcttcatgaacgagatggccaacctggccgagcgactgggggccgacatcgagatggtgcgccagggcatcgggtccgatccgcgtatcggctatcactttctgtatgcaggcgtggggtatggcgggtcgtgtttccccaaggatgtccaggccttgatccagaccgccgagaccctcgacttcgatgccacgctgctcaaggccgtggaacgacgcaatgccgaacagaaaaacagcctgttcaacaaactgtccacgcatttcaacgcgcaactggcgggcaagaccttcgcgctctgggggctcagtttcaaacccaataccgatgacatgcgcgaagcccccagccgcgtgttgatggaggccttgtggcgtgccggggcaaacgtgcaggcctttgatccggaatcgatggaagaaacccagcgtctctatggcgaccgcgaagacctgcgcctgtgcggcaccaaggaagcctgcctgaaaggcgccgatgccttgctgatcgtcacggagtggcaggtcttcaaggcaccggacttcacggtgatcaaacagcagctcaagcaaccgctgatctttgacggacgcaacctgttcgaccccgtcagtgtgcagaagaaaggtattcactacgtatccgttgggcgacctctcaacccggtataggtcttcccatgagtgtgcttaaaagaatcgtcagcggcattggcgccaattcgtttggccaggtggtaaacctgctgatccaggtggtgagtgtgccggtgctgattgccagttggggctttggcgcctacagcgaatgggtggtgctgtctgcgattccaacctacctggcgctgtctgacctgggcgtgaccacggcggcatcgagcaaggtcgtgatctggcacgagcgcggacggttgaaggtcgcgagtgcggtgtacagcaccagctttgcgtttctatccctggcgggactcagtgtgctgttgctgaccctgggcgccctggcgttgtttgacctgttcagcgtgctcaacctccagtcgatcaagagcggcgacggggtgctgattctctcggcgctgaccggctactcgctgctttgcctgtttaccaacatgatttcgatccgctaccgggccaataaggccttgccgttgtcggcattcatcatgaacgtcatccgcatgctggaatggtcggccgcgttgctgtgcgcttacctgagccacagcctggtcgccaccagcctggtgctgttggccgtgcgcgcgacgggcatcgtcagcaagaaccagatcgccaatcggttggggatcgccttgcgtttcaacctttctgcgatcggcaggcgggcatttgtgacattgatcaaaccgtcgctggcttcgctggcctttccgattggcctggcgttgaacgtgcaggggctgatcattctgttgtcggtgctgctgtctccggcgcacgcggcgatattcggtttgtaccggaccatttccagggtgttggtgcagttctcgaccgtggtgaaccaatccctgtggccggagatttcctatgcgttctctatcggtgacaaccaactggtccgcaagatgctccgctacgccttgcggttctcgctgcccatcgcctgtgtgctgggcgcgctggtggtgatattcggcgggacgatcttcgatgtgtggtcgggccgcaaagacgattattcctccagcatcatgctggtgctgatcatcggcgcgctgacccacgtggcttggcaggtgtattgggtggcaatgatggccacggcgtcctattcgtcgtttgccgtggtgttcatgttggtgtcaatcgccagcattctggcggtgttctgcctggcacaagactatggcttgctcggcgtctgctacgtgctggtggccaccgaagtcgtcctgttctgttttgccaggcgcggtttccatcatcttgaactgaggatggcccgtgctgattaatcacctgatccgccatcgattgaaaatcagcctgctgacgcctgaggggctcaagtacctggccaagcgcgtgctgttgctgggccgcttgctcaaggccgatcgccgccaacgcatgttgcgccgacagggggccagcctggctccgctggtgatgatcaatgccgtggaattcgaaggctccgtcgcgtgtttcagcgtgggcaccggcagctttatcggcaagcgcacctttatccaattgcacgccgccgtccgtgtgggcgcccatgtggcgatcaatgaaggcgtgcgtattctcacgggtacccatggcctggatgatcctgcctggcgcttgaaagtcgccccggtggtgatcggcgactacgcctgggtcgccactgacgcgatcatcctgccgggcgtgacgatcggtgaaggtgccgtcgtcggtgccggcagtgtggtcgggcgcaatgtggaaccgtacagcgtggtggcgggcaatccggcacgggtcatcaggtcgcgtgctgcgcatgcgtttacctacagcccggtccgctcaagtgccgtcgtcgaagcctggatgggtaaataagatgattctggtcgctcatcccgttggtaatcagaatgtccgcgcgttgctgcgcgcgttgaatcaacggcagttgctgcactcgttccatacctcgctggcactgcataaggagtcgttcctctgccgtctgccggtggtgggcaaggagtgcctgcggcgtacgttcgatcaggtcgatggcgcgttgctgcacagttacccgcgttatgacgtgccgcgtgtgatctgcgacaaactgaggtggtatcgcctgacacggcgcaacaccggcatcttctgcccggaaaacgtctaccaccacattgaccaggccagcgccggtttcctttacaagaccccgcgcaaacccagccaggtgtacggctatgacggcaagtgcctgggcttgttcagcgccgcccgcgacatcggcgacatcaccctcaattatgaggcggccttcggctccatcgcctacgcctgcaggatgcttgagcatgagcgcgaggccaaccctgcctggcgtgccagcattcccaatatcagcgatgacaccgtgcgcaaacagacggccgagttggccttggcggaccggatcatagtggcgagtacctttgccaagcgcaccctgggtgagcacggcgttgcgccaggcaaggttgcgatcacgccctatggcgcgccggcgccgatggtgcgtcatgaagcaagcgcccggccaggtgcacgattgaaagtgatttatgtcggcgcgctgacccagcaaaagggcatttcgtactttttcgacgcgttgaaccttgcggcgagcagcgttgccctggacgtcacggtgatcggtggcgactacgccaacggtcgcaaccccgtgctcaatgccgagctgaaaaagtaccagtggtttagctccgcgtcccacgatgacgttatccgccacttgatggaggccgatgtgctggtgctgccgtcggtcgccgaggcgtttggcctggtggtgggtgaagccttgtccacgggcacagcggtgatcgtgtcgcagaactgcggggcggccgacctggtcgtcgagggtttcaacggttatgtggtgccgatccgctctgccgaagcgatcgccagccgtctggttgagctggccgaagacaaggacaagctcagtgcgttgcagcacaacgctgtgttgtctgccggtggaaccacctgggacagctacgccagggaggtgatggatgcaatccttggccattcctgacagggtcagcctgcatgagcgctaccgcacgcgggtggtcagcgccttcgtgcttatctacctgttcatcctgttcgaagggatcttgcgcaagtgggtgatgccgagcctcagttcggtcatctatttcatcaaggacccgattgttctttatatctactggtgcgcctaccggttcgggtttttctcgaaaaacctggtgtcggcctactttgtcgtgctggtcatggtgttcttcctgctggtggcagcgtttttgttgagcagccctgaaggcttcgtcatctacggctacggcgtgcgcaactacctgctgtatttcccgttgatatttgttgctggcaagacgctcaggttgacggacgtctatcggttcgcccgtatcacgctgttcgcggcgatcccgatcagcgtgctggtggtgctgcagtattcgtccggaccccaggcgtatgtgaacaaaggcattggtgatgatgacttcatcttcatgattgccgacggtgtcgtgcgcccctacggcaccttcacgttcaccgccgggcatgtggtgtacgtgtcggcctgctttgcattcctggtcgcggcggtgtttgacaaggccttgttccgtgccgtgttcgcccggcgctacgggctgtttggcgtgtcggcggctgcggtggcggtgatgtgtttcctcacgggctcaagggccatctacgcgtacgctgcgattgtgctgctggcggcgctgatggtcgccttgatcaagaaatcgcaacgcaacctgttgtcgttgtttttcctggcggccgcgctgtttgtcagcctgctgattttcatgtccaccgacagctaccaggtgctggtggagcgcaaccgcagcgcggtggccagtgaaggctcgccggtcactcgcgcgttctccagcctgtatgcgttcacgcgtgtggttgatgacgcgccgttgtggggccacgggataggttcgggcaccaacgccgcctcgacgatcctgcgcgcagggcgggagcagggcgcaggctttttactggccgaagatgaatggtcacgcatcgtgctggaaatgggcctgcccgccgggctgatgttcattctgttccggatcttcgtgctgctctggttactgctcaagtcctacacggcgctggtcaggcaaggcaccggggtgccgttgctgctgtgcggtttcctggcgccgatcctgttcaacggggtcatgaccatgcagggcaccttcctggcgtttggcgtgctgtatgcctgcctgattctcgcggcctgcaagaaaacctgaacctactcaacgcatcagcggacgacagcacgtgaagttactaagaatcatctcttcggtcagaccggaaaaaggcggcccgatcaacgcggcccgggaaatcgacacggtgctcgcccaggagggacatcgcgtggatgtcctgacgctggatgccgagttcgcggtggactatcccggcaccgtgcacttcatggggccaagccgtttcggctacggcttgaacggcaacatccgtcaatggctggagcagcacgcccggcactatgattttttcatcatcaacggcttgtggcagtaccacgggtttgtcgcccgccaagtgctgaacaagttgggccgaccttacatcgtgtatacccacggcatgctggatccctggttcaagcacgaatacccgctcaagcatctgaagaagtggttgtactggccctggggcgaataccgggtgctgagggatgcgcggcgcgtggtgttcaccagtgaagaagagcaaatccgtgcgcgagagtcgttctggctgtatcgcgcccatgaaacgatcacggcgtatggcactgccagcccaccggccgatggggcgcgcctggcacacgacttcatcaccgaccacccggaactcaagggcaagcgggtggtgctgttcctgagtcgcatccataagaaaaagggctgtgaccacctgctgcaggcatttgcccaggtcgccgggcaagacgagcggctgcacctggtcatggccggccccgatcaaggcggctgggtacaagcattgcaggatcaggccgaaaagtcgggcatcgcccatcgcatcagctggcccggcatgttgcaaggtgcggcgaagtggggcgcgttctacgccgccgaagtgttttgcctgccttcgcaccaggaaaatttcggcgtggtggtggcggaagcgctggcgtgcggcaagcccgtgctgatcagcaacaaggtcaatatctggcgtgaaatcgacaaggatcgcgtgggctttgtcagtgacgacaccgctgacggcgccctgcacaacctgcaacgctggttgcagctggaggcgcccgcttacgcgcaaatgtccgagcgggccagggcgtgctttgccgaacgctttcatatccgtcgcggtgcgcagcgcttgctggagattgtgcgggagtgcttcccgtgattcttcaaggcaatgacccgcaccgttcggcctcgttctcattgggccatcggttgcgccgccagctctggaacatggtgtacgtggtgctgtttcgcaccagcccgcgcccgctccatgcgtggagggcctttctgctgcggctgttcggtgcgcggttgggcaaaggggtgcacgtgtatccacgggccaaggtctgggcgccctggaacctggagctgggtgaccatgtcggcattgccgatggcaccacgctgtacagcatggcgttgatccgcatcgggcgctacagcgtggtttcccagggcgcgcatttgtgcggcggctcccacgactacaacagcaagaacttccagctgtatgcaaaacccatcgtgctgggggagcacgtgtgggtgtgtgccgaggcgttcatcaccccgggcgtcagtgtggctgacggcgtggtggtgggtgcccgcgccctggtgatcaagaacatcgcgcagccgtggaccgtgcatgcagggcatccgtcccgccagatcggcctgcgtacccagcatgtgcaggagcccacgccatgaagcgcgaaaccatcagcgtgatcatcctcacctacaacgaaagcctgcacatcgcccgggccatcgactcggtgcgggccttcagcgatgaagtgctggtggtggactcattctccaccgacagcacctgcgacatcgcccgtgcccacggcgcgtgggtggtgcagcacccgttcgtcaaccaggccaagcagttccagtgggcgctggacaacctgccgatcaccggcaactggacgctgcgcctggatgccgacgagatcatcgaggctgacctcgctgccgagatcaacgcacgcttgccgacgttggccagcgatatcaccggcatcaacttcaagcgcaagcacattttcatggggcgctgggtgcggcacggcgggcgttacccgttgaggatgctgcggctgtggcgcaccgggctcgggcgcatggaagaccgctggatggacgagcacatctcggtggccgagggtcgcaccatcaccctggaaggtgggttcgccgaccataacttgcatgacttgaccttcttcacccacaagcacaaccagtacgccacccgcgaagcgattgaagtgctcaacacgcggctggggttgtttgcgatccgcgatgaactgcacacggggcagagttcgttccaggccaaggccaagcgcctgatcaagaaccgcctttataaccgcgtgccgttcaccctgagttccaccgcctatttcttgtggcgctacatcatccagctggggtttctcgatggccgcagcggcctggtctatcacctgctccagggctattggtaccgcttcctggtgggcgccaaggtgctggagctggaaaccgcaattgcccatttaaacgataaggaagccattgtccgggaactctcgaagttgaccggccataacttgaacctgcccaaacagaagtaactgaccgtttttaacaaacacccaagtttgggtgtcggccttcgctcgcctatcaatcgggagacagacatgaacaaagttgcgcttatcaccggtattaccggccaggatggctcgtacctggcggaactgctgctggaaaaaggctatacggtgcacggcctcaagcgacgttcgtcgtcgttcaatacccagcgcatcgatcatatttaccaggacccgcaggccctgcataaaaacctgatcctgcactacggcgacctggcggactcgtcgaacctgacgcgcatcatccagcagatccagcccgatgaaatctacaacctcggcgcgcaatcccatgtggcggtgagcttcgattcaccggaatacaccgccgatgtggacgccctgggcgccttgcgcatccttgaagcgatccgcctgttgggcctggaaaagaagacccgtttctaccaggcctcgacctccgagttgtatggcttggtgcaggaaaccccgcagaaggaaaccacgcccttctacccgcgctcgccctatgcggtagccaagttgtacgcctactggatcaccgtgaacttccgtgaggcctatggcctgtatgcctgcaacggcatcctgttcaaccacgagtcgccgcgccgtggggaaaccttcgtgacgcgcaagatcacccgcgccctgaccaacattgcgttgggtctggagccgtgcctgtacatgggcaacatggatgccctgcgcgactgggggcatgccaaggactatgtgcgcatgcagtggatgatgttgcagcaggacagcccgcaagatttcgtgatcgccacgggtgtgcagtattcggtgcgtgacttcattcgctggtcggcggcggagctcgggctacgcctgcgctttgtgggtgaaggcgtggaggaggtggcggtggtcgagcacatcgatggcgacctggcgccgggcattctggtgggcgatgtgattgtccgggtggacccgcgttacttccgcccggccgaggtggagacgctgctgggcgacccgtccaaggccaagcgtgtgctcggttgggtgcctgaaatcagtgcgcaggcgatgtgtgcggagatggtccgcgaagacctcaagatcgcccagcgccacgccttgttgcgcctgcacgggcatgacgcaccgattgcggtggagaactgaacatggcgcgtgatcttgatgcgcggatttttgtcgccggccatcgtggcatggtcggttcggccatcctgcggctcctgtgggcgttgggctacacgcagatactcacggcgggccgcgatgaactggacctgctcgacccggcggccgtgcaggcatacttcgccaggcaccgtatcgaccaggtgtacctggcggccgccaaggtgggtgggatttatgccaacgccacatacccggccgacttcatctaccagaacctgatgatccaggccaatgtgatccacgctgcccacagccatggcgtgcagcaactgttgttcctcggctcgtcatgcatctacccggtgcatgcgccgcaaccgatgatcgaagcggtgttgctggacggtgcactggaacccaccaacgagccctacgccgtggccaagatcgccgggatcaagctgtgcgaaagctacaaccgccagcacggccgcgattaccgcagtgtgatgccgaccaacctgtatgggccgggcgataactaccatccgcaaaacagccatgtgatcgccgccttgttacggcgcttccacgaagcgacccagcgcggcgatgacgaggtggtgatctggggcagtggccgaccgcgccgggagttcttgcacgtggacgacatggcggcggccagcgtgcatgtgatggaactcgatgcggcgcgctaccgcgaacagacccagccgatgcgctcgcacctgaacgtcggcactggcgtggattgcaccatcgccgagctggccgaggcgctggtgcgggtcaccggtttccaggggcgcctgcgtttcgacgccggcaaacccgacggcgcgccgcgcaagttgctcgatgtcagccgtatcaacgcccttggctgggaagcctacgtgccgctggaggagggcttgcgtgacgcctacaacgcctatctcgcggcgctcgaacagcctcggggccagtgatgaaagtccttttgtacggcatcaattacagcccggagctgaccggtatcggcaagtacagcggtgaacaggcgcgctggctggcggcgcaaggtcatcaggtccgcgtggtcacggcgccgccgtattacccgcagtggcaggtgggcgagggctattcgccgtggcgttttcgcaccgagctggatgccggcgtgacggtgatccgctgtccgctgtacgtcccgcgccagccgacggcgatgacgcgcctgctgcacctgataagtttttccgccagctcgtgtgtggcggtgctggggcaactgcgctggaagccggacctggtgatcctggtggtgcccacgctgttctgtgcgccccaggcgttgctgttggccaagctcactggcgcgcggtcggtgttgcatgtccaggactatgaagtggatgcgatgctcggcctgggcattggcggcggttcgctgttgcggcgcctggcgttgggtgtggagcgctggctgctgcggcgctttgatcgggtctcgacgatttccagcggcatgctccacaaggcacggggcaagggcgtgtacagccagcggttgatgttctttccgaactggtcggagaccgcacgctttcgcgatgtgccgcgcgaccgcgcgttgctgcaacgcctgggcgtgccgccgggaaccaaggtgttgttgtactccggcaacctcggcgagaagcaaggcctggagctgatcctcgatgccgcccaggcccatgcccagcgcacggagtgggtgttcctgatcgtcggccagggcaccggcaaggcgcgtctactcgaacgtgtacagcgtgatgggctgcgcaatgtgctgttcgcgccgttgcaggcctacgaggacttgccggcgctgctggcctcggccgacgtgcacctggtgatccagaagcgcggcgtggcagatgcggtgttgccgtccaagctcaccaatattctggccgtgggcggcaacgcaatcatcaccgccgaccccgataccaccctcggccgcctgtgcgaggaacatcagggcattgcggtgttgatcgagccggaatcggtcacggcactgagcacgggtatcgagcgggcactggcaatgccgacgcgtaatgaggtggcgttgaattacgccaaggagttcctcgacaaggaacgcattctgcaacgttttctggcacaggtttgatgggtatgtggcttgatttaccgaccttccaaacggtcgtggcttcgacgccgttggtggcgatcgacctggtggtgagaaacagccgtggcgaggtcttgctcggtatgcgcgtcaaccggccagcctttggtttctggttcgtgcccggtgggcgtatccgcaagaacgaaagcctcgacagcgcgttccggcgcatcaccggcgaagagctgggacgcacgtttgaacgggccaatgcacgactgctcggcgtgtacgagcatttctacgatgacagcgtgttcgccaacgccggcagcgggccggacacccactatgtggtgctcggctattgcctggacctggacgatgggcagactcttttgctgcccaccgagcagcatcagcagtaccgttggtggccacaggatgaactgcgcttcagcccgcgcgtgcatgaaaacagccgcgcctatttctgacgctctgcctcgaggatgcatttatgttgttacccgtgatcatggcaggcggttcggggtcgcgcctgtggccgctgtcgcggcaacagaaccccaagcagttcctgcgcctgaccgatgcgcacctgtcgatgctgcagcagaccatccagcgcctggagggcgccaacgtcgccttgccgcagttgatctgtaacgagcagcatcgtttcctggtggccgagcagttgcgccagctcggcatggagcaggcgagcatcctgctggagccggtggggcgcaacaccgcgccggccatcgcgctggcggcgtgcaaggcggttgccgagggcctggacccgatcctgctggtgctggccgccgaccatttgatcgaagatgtgcccgcgttccatgccagcctcgaagtggcgttgcccctggccagggctggcaagctggtgaccttcggcatcaccccgacctgcgcgcataccggctacggctacatcgagcagggtgcggcggtgggcgagggcgggtaccgggtaaggcgctttgtcgagaagccggacgctgccacggccgcgcagtatgtggcgagcggtgattacgcctggaacagcggtatgttcatgttccgcgccagccgctacctggcagaactcgaacgcttccagccggccatgctcgaagcctgccgcgtggcgctggagggcggtagccaggacctgccgttcacccgcgtgcatgcggcaaccttcgccacatgtccggacgactccatcgactacgccgtgatggaaaaaaccgatgacgcggtgatggtgccgttgcacgccggctggagcgacatcggctcgtggtcggccctgtgggaggccagtgcaaaagacgccggcggcaatgtgctgcgcggtgatgggttgctgctcgatacccgcgatagctatgtgcacgccgacagccgcctggtcgccaccgtcggggtgcacgacttgatcatcgtcgagaccaaggacgccgtgctggtggcccacaaggaccaggtgcagcaggtcaaagggatcgttgatcagctcaagcaagccgggcggcatgagcacctcaaccaccgcgaggtgtatcggccgtggggcatgtatgactcggtggacagtggcgcgcggtatcaggtcaagcgcatcaccgtgaagccgggagccaaattgtcggtgcagatgcatcaccaccgcgccgaacactggatcgtggtcagcggcacggcccgggtcaccaatggcgagcagacctacctggtcgcggaaaaccagtcgacctatatccccattggccaggtgcatgcgctggagaatccgggggtgattcctctggaattgatcgaagtgcagtcggggtcttatctgggcgaagacgacattgttcggtttgaagacaagtacggcagggcctgaagtttccgacaattaataacgttccggataacttcaaccatcggcaatgcagtgagggccgggcactttgccggtaaaacgttattttcaactaatgctcctggaagttacccgtctggtgtgctgtttagttggatggcactatcggcccggctactcactgacgataaggagtctgttatgagaaaagcactggcggttattgtgctcagtgtcatgagtaccacggtgttggccgacgagttgccgttggggctcagtacaccgctggcgggttcggtgacagtcggggaaaccctgctggtcgccagcgccattgttgccggcgtggcggctgcgtccaacagcggcggcagttccaacggcggcaccaccaccgggaccaccggtacgaccggaaccaccggcaccggcaactgatccaccacttcccgcttttcagactgcttggactccccacccaagtagtctttttttcttgtcgtttatcgcgagtgtccgagcactatgatgcgtattttttctgtggcggccgtggccgctgcattgttacagggctgcatgttcgcacccggccaatacatggacacggcggcgttgactgaaagtggcggcgcgcaaaacagtcgggtggatttgattccgatcacgccaaagttacttgccatggacgcggccagccaagtaccttattccattcccgcggaactattgagttataagccgggcccgtatttgatcggcgccaatgacgcgttgtatatcaccgtgtgggatcaccctgaactcacggcaccgtccggcccgcaacaacagatcgatgccaacggccgcttggtcagccccgagggcaacctgttctacccctacgtgggtgagttggttgccaagggccgatccattgaagcgctgcgcagtgagatcaccgacaagctgcgccaatacatcgatagcccccaggtggacgtcagcgtactgcgcttcgccagccagcgcgtggtgatcaccggcgcggtagccaaggccgggccggtgccgatcaccaccatcccgctgaacgtgatggaagccatgggcgccgccgggatcgacccgctcaatgccgacctgtccaacctcacgctcagccggggcggcaagcgctacaccctggacctggacacgctcaacttggcgcagtcgcgcttgaacgacatctacctcaaggacggcgaccagctgtacctggcctacaacgaccgcaagcgcatctatgtgatgggcgaagtcatgcagccccgcgccctgaccttcaagacccgcagcatgaacctctccgacgtgctcggctcggtgggtggggtcaatcagaacacctccaacgcggacgcgatctatgtgattcgcggcgcgcagaacatcgccaacgagccggccaaagtgttccagctggaagctgcgtccccttcggccatggccctggccacgcgctttgatgtgcagccccaggatgtggtgtttgtcggcccggcgaatatcacgcgctggaaccgcttcatcagccagttgatcccttccgccacgatcgtcggcatcggagcgtccactcagaacaacctgagcgaagccagcagccgatagggtggaacctgcgtgaacactcataaattcgctgcttacaccggcttggcgtggctgttggctggctgcaatccgctgatgaccgcctccctcgataccttcaaggcggccgtggctgggccggcgccgctggagctgacccaggcccaggtggacgcagtgccgtttgcccagatcaaagtcaccacggtgtccagcgaaggggtgatggcgctgattcgccagcgtggcgacctgcagttctgggtggcttccggcaagcaggtgctgttggtgcgtaacggcttggtggtgcgtacggtcggcctgggcgtggacctcaatggcacgcactggcaggaccagtcgccgttccagcaaggcttgcaccgtgtgccggatggctaccaaagcacgcggcagatcgatggggtggacggctatcgcatgggcatcacgctcaccagccgtatgacccgcaagggcatcgaaacggtcgagatcctcggcacgccctacgctttgttgcgggtggacgaagacgtcgaggccagcggttttcaggcgcgcaaccgttactgggtcgaccccgtcgacggctttatcgtgcagagcgaacagcacctcacgcccgacctgaccctgaccatcacccagctgcaacccactcgcaaggacgcccgatgatctgtcgaatactcacggcgctgctgctgtcctggagttgcgtcagtacgagccacgccgccgtgaccgtcagcggccaggtgcgcaccccagggcctattgcgctgccacccgatccacgtttgctggacgcgatcattccgtcgcaaccggatgcccagggttattggctgggagcggcctggttgcatcaacccttgctggaacgccaggcgcggctcaaggccggtgtgctgtttgatttgcaaaccctgcaccaggccgcgcgggctgacgcacgcgaaggccgggcccgtgttgccgaacgcttgtatcagcaggtgcaggccttgccggtcactggccgccaggtggcggtgctggacccggtggcggtggaagtcggctttgcgccgaacctgccgctcagcgatggcgaccgcctggtgtacccgccacggcccacgcaggtgcgcgtggtgggggctgtcgctgcggcgtgcagcctggcgttcgagccgctgcgggcagcccgcgattacctcaccgcgtgcccgccactggtggaggcggatgctgattatttgtgggtgatccagcctgacgggaaggtctcgcgcctgggcattgcgccctggaaccgcgaagagggcgcccccccagcgcccggcgctacgctgctggtgccgatccgcagtgacgacctgagcgcgtccacccctgacctgaatcagcaactggccgagtttctcgccacccaacccctggccgaggttacgccttgaaattatgtattgcggccgtgctgctggtgccgtgtggcgtcgcgcatggtgatccccgttacacccaaagcgatttcggcggcgtggggctgctgcagacgcctaccgcccgcatggcgcccgccggcgaactcagcgtgaacgccaaccgcaccgagccctacagccgctatagtttttctgcgcaaccactggactggctggaaggcactttccgctacaccgcgatcaccaaccgtccttatggcgccgagtcgttcagcggcggccagagttacaaggacaaggccgtcgacgccaaggtgcgcttgaaccaggaaacccactggctgccggaagtggcgctggggttcatggacctgggcggcaccgggctgttttccagtgaatacctggtggccaacaagcggtatggcgacgtggatttcagtgctggtatcgcctggggttacctgggcagccgtggtgattttggcaacccgctgggcgcgctggatgatcgattcaacgagcgtcccagcgctgaaggatccggcagtttttccaacggctatttccgtggccggcccgcgctgtttggcggtgttgcctaccagacgccctgggcgccgttgagcctcaagcttgaagtggaaggcaacgactacaaaaatgaaccacgcagcaacagctttcgccaggcttcaccggtcaacctgggcctggtctacaagctcgccgatgcggtcgacgtgagcgccgcatgggagcgaggcaataccgcgatgttcggcattaccctgcacaccaattttgtcagccgcaaggcacccgccaagacctatgacccaccggctcctccgttgccggcgaagccaccgaccacaccgccggaccaggtggattgggccgccgtgtccctgcgcctgcacgataacgccggctacaatgtgcaacgcattacccagcgtggtccggagttgctggtgtatggcgaacagcagcgctatttctacagcgccaaggcggtggggcgcgccagtcgtatcctggacaacagcgtgaatgaccagatcgactggttcaccctggtcagcgaacgctatgccatgccgatcgaggaaaccagcgtgccgcgccagacctttcgcgaggtggtcaaccagcgcgaagccttgcaggacctgcaccgccaggtcgaggtcaatcgtgccagcgagcgtacgcagaccgtgctctacacccaaacgccgaagcccctcagctatgggctgggcctgggctacaagcagaacgtcggtgggccggatggtttgctctaccagatttccgccgacctcgatgccgagtaccgcttcacccgcaacacctggtggagtggtttgctcagcgtcaatctgctgaacaactacgatgggttcacctacgacgcgcccacgggcttgccgcgggtacgcaccgacctgcgcaagtacatgaccagtgccgacgtgaccttgccgacctttcagctcaaccatgcgcagcgcctggaccaggacctgtacggcatggtctacggtggtttgctggaatcgatgtatgccggtgtgggcagtgaagtgctgtaccggccgatgggtcagggctgggcggtgggtgccgatgtgaactatgtgcgtcagcgcggtttcgagcaggatttcagcctgcgcgactatcgcacggtgaccgggcatatcaccgggtataccgacctgccattcaacctgcagggggccttgagtgtcggtcgctacctggctcgggactggggtgcaacgctggatctttcgcgggagttcaacaatggcgtgcggattggtgcgtggatcactcgcaccaacgtgtccaagcaagagtttggcgaaggcagcttcgacaagggcctctacctgtccattccgtttgatgagttgatgagcctgtcgacgatgcgccgcgccaacctggtgtgggcaccgctgacccgcgatggcggcgcgcgcctgaatcgcgcgtattcgctgcattcgatgaccgatgggcgcgacagtgcattgttctacaagaatatcgacaagatcactgagtaaggccagtaggatcgggggttagtagatgtccttggacagcagcgtaaacggtgtcttcagcaggatcttgatatccagccacaacgaccaggtgttgatgtagcgcaggtcgatgtcgacgcgtttttgcatcttctccagagtctcggtctcaccccggcatccattgatctgcgccagcccggtgatgccgggcttgatgcgatggcgcgccatgtacgcgtgaatcttgcccgagtaatagtcgttgtgtgcgatggcgtgggggcgtggaccgaccagggccatatggccttgcagcacgttgaacaattgcggcaattcatcgatagaggtgcggcggataaaccggccgaccggcgtgatgcgcgaatcattgcggctggcctggcgtacctcgtggtcgtcatgcacgcgcatcgagcggaacttccacaccttgatcacctggccattccagccatgacggtcctgcttgaaaatcaccgggccgggggaggtgagcttgatcagcagggcaaacaccaggagcaccgggctcagcaccaggatggccaacagcgcgatgctcttgtccagcaacgctttgctcagggcggcggtggggcggctggtcagcgggctttcattgaggaagatcgctggcagcccatccacttcggcgacgcaatggttgagcagcagcatgttgttgaggtcgggcacccagatcacatccacgctgatctccagcaggttgaggtacaacgcctcgatgtgggtggcgtcctgcaacgagtgggtgatgtacaggcggcgaatgccatgctggcggatcagttgcggcaattgcggcagctcgccaaggatctgcgcctgtgcatccggagcggcctcggcatggctgccgacgagccccaccaacggcgagcgcttttggcgagacagagtgttcgccaggtcaacggcaagtttgccggtgcccactatcagtgacttatgccgttggtgaagttggcgatggtaataccgggacaggctgtgcagcgggatataacacagggccagcagagggtaactaaccgccgcccagagcaacaagatgtccaatggaaacaatgcggtggcattgcaggcgatacccaccgcgaacacgattaaagcggtgagtaaccagcccatgaacagtcgtcccaagcccacgccatagtcatctttcttgctgtagacatcacacagactgtacgccggtaatgaagccagtatggtaaacgccgcgagcacacggtagttgtactcaagttggccggtcttgaacacgaccaacataaataacagtgcaacgaccaaacccgaggcaagcatccactgaccccagaacgtcaaccccttgggggtcaggttgcgatgcattctagtgttattcagcatagttctgctcccggtggtgaccacgcaggtggtggcagggtctaatcacgcggtggaatacccgcactaaaagataggcacgcgcagtcgcgtacccacggatagtaatgaacggcaggaggcattggctgacgacttataacaaggtcagcggcgtcttagtgtgagagtgttataaatgggcaggtaaaagtgtgtattaataggcagggtgggtatcaaagtatccgttcttgttttttttgttttagcggcgtgacggggtgagttccagtggtttcttgattttttgtgtaaggcaataaccacggtttctgaccgcacgaaacaaacgttcgccgtcgttggcacgcttgaacttttcctgcagccggctcaggcacatttccaacccgcgatatagatcaggttcgcgtccgatattacggatcagttcctctttgctgacaacacgctcttcatggtgcagcatctttttaatcaacgccgattcaatggttgtcagtgaaatacgtaagccgcctttgaccagggtgcggtcatgctgtgtcagtagccagaaatcctgaggataaagttgagttcgctcagggtttatctccgtaggccgagtggggttattgggcgtgctgtcgtgatccgttggcatggggagtctggattcttgtcgcacagagttaaaagagtgtgagggtaagccaagtgtgtgggtaatgacataggttgtcaggcgtcggttgtcgtcggagttggagtgtagagggttgtttgcacggattttagggtctgtttctgttggcgcgaatgtattcaagtcgtaatgaaacaattcggcattgggcgtaaagtctcgcagtgcgatggccgcaagtgtgggggtgaaggcgtgtttcttgagggagctcatagtgtccaccgttagtatgaaagtgcggtttttataagcaatcggcaggggagtagtaaccgccctgaaagtattcgaacggcaggtttttagccagcatggcactgtcggcaaattccacggtgtcggcgatgaagcgcacccgggttgcactgatcagctcaagcatgcggtcgtaaagccgatcgaacagaccggaacgcgtattcaggctcagccgcagggcggagtccgggaaaggcattttcacgtagtcgtaaagcttgaggtcgatcagcaggtctgccggttttgtatcgagtctgtaattgttgtaggccagggtgacagcgcactggtcttttaacttatataactgacgcaccatcgctcggcgctcgacagggccgggcagggcatccagaggattggtaatactgagcgtaaagggctgtctgcgtttttccagtgactgggcggtctgaacaatgctcttgtggagatcttcgttcatcaaggcggcttgatcgatccgcaggaacttgcggctgacaacggaattgcaggctttatgtggtgcgctgatacgttgcagcgccttgtggtaggcactgtcgggtagttcgtgagcctgcagtgagccaacgctgacttcgttgccccaaagtgcatggctgcgatcaacgatggcttgcctggcaagcctgaagtccacagcatcggcaggggctaccttttcgctattcacggtgggatcgttccttggcggtttgaaaatggctggcacatataactccccggcttagtttgtaaccataaccacggatattctgaataatgttgtcaccgtagtgcgccttgattttactgcgcagtcggctgatggacttttccagggcgcgggagtcgtagtacttggtattaaggcccatgacttcggcgatttcattgtgactgagcagtcggcgctgtataagcgcgtccagaactttcatttcgacgaaggatatttcaagtttcttgccattaccataaaggcacatgcgatcctgatcgagcaccaggccacaacgattcagtcgttcaccttcactgagaaaagcatcaaacaggcttaactttttttcaggggacgcctctgccactttgatgcagtaatccgcgccggccagatagtatttggtcttgctcaaactggaggcgaatgtgacgacgacaaatatggtgcagttgggatggctgtttcgggtttttcttattatatccagggtttgattgcttgccgcgggggtgtcgatttctatgatgatagcgcggtagcttgcatggctttcctgggtgtcaacaagttgttcgtagtaacgtgtatcgactttcaaatcatccgctacagtgcgaactataagctcccgaaaatcctccgatttagattgagtccgtgcaatagcgaggacgttggaaaaatgcatcacctactcccttttccggcatgcaaggccgtcagttcaatcgctgctagcgtttagatactaatcgaattgaatacggtaaaacgtgacaaattttaacattcgccactttgtttttcagaaaggaatggggtagtgcgcggttattgcgagggtttttgcacgggcgtacacatatgctagtgcaaactcttaatgtgcgataagtattttagcccaaacggtttttttgctgaatcggggaaacccttgcatcgctaaggagggaaggcagaggtgcgcgccacgcgcctgcattcaaatctgctcctccccccgcaattgcacactcatgtcatcgcagtttttcgcccagtcgctgagccattgcggcatcggtggcgaggtctcatccaggcccagttccttcacaaagtcgcccgggggcagggtgcccttggctgaacggaacagcccgcgcatcaccaccacgccgaccacccggccgttgctcacgaagcggtgctccatcaggctccacttgtggtcccagccgagcatgcgtgtgtgtacctcaaacacttcgaacagcttcagctcgcgacggaatttgccccaggtatcgccgacgatcggcagcgccttgttgcgcaatgccacgcgaaaggccccggtgcgcaatacgaaatccatccgggcaacgtccgccagggaaaagtaccggccattggtgacgtgtcggttgatgtccaggtccagcggccacacgcgcatgcgcaccaccgtggtgtccaggccatgcacaggtttgcgccaggggcgccgggacagcatgaagagcaagcgaaaccacagattcatccaaagcacctgacagttgttcaaaggcagcactgtaggggcgtggaatccgctaaggtagatgcacaaatgacttattacatgcgaaaaacgcaatcgggcttttatcatgcatatcaccttgcttctggctgatcgctgctccgccgccagcgccaccacggccctggagatgctcagcgccgccaacctgtttgccgactcaccgcctttcgaagtcgcagtggcttccctggacggtcacgccgtggtggcctggggtggtcaacgcctgcaggttgatcacgcgctggcgcagatcgtgcggactgacctggtgttgatcccgggctttctgttcacgctgaaggaggccctaccgacctttcctgcgtacgcgccctggctgcgcaaacagcacgcacgtggtgcggtactggcttcgatgtgcaccgcagcttttctattggctgaatccggcgtactccagggcctgcgcgccacgacccactgggcgtttgccgagttgttccggcgccgctacaccgacgtgagcctggaggacgcgcagctcctctgcgaagagaaccgtgtgatcaccagcggcggggcgactgcagcgatggacttgatgctgcacctgatccgccggttcggctcgccggaactggcccatacctgtggccgatacctgctgatcgataacgtgcgcagcgaacaatcggtgtatgccatgtggtcactgcccaaaagccatggcgacggtgaggtcctgcgggtacagcactggctggaacaacactttgccgaacccttggtgattgacgaggtggcccggcaattcggttttggcgtgcgcaatttcaagcggcgcttcaaggaggctaccggcttcacgcccattgcctacctgcagaccctgcgtctggaacgggccaagcaaatgctggagtcgacccgcatgaccctggaaagcatcacctacgcggtgggctacgaagacagcaattcattccgtcgcctgttccagcaacgggtaggtgtgttgccggcggcgtatcgcaagaagttcctggtccggccggcttgactcaggggcgcggcaacagatcggcaaggcgttgctgtagatcgaccgtgacctgcatgaattacaggcgaaaaaaaaccggctgatcaggccggtttggggttcccgcaaacagcgcgggattatgcgttgttgccttgcaggcgatcagcaccgccttcggccaggccacgttcctgcaagcggtcagcaccgccttcggccaggccacgttcctgcaagcggtcagcaccgccttcggccaggccacgttcctgcaaacggtcggcgccaccttcggctacgcggttaccttgcagacggtcagcaccaccttcagcgacacggcgttccagcaggcggtccgaaccaccttcggcaacacggttgtcttgcaggcggtctgcaccaccctcggcgacgcggctttcgatcaggcgatccgaaccgccttcagccacaaccgggtgggcaaaagcattggcagcgagtaccgagaaagcgaggctaagcaagatttggcgtttcatgattgtgtgctccgagtgttttgatttaagtgttgccgggtatgggtttgatgttacgcgttgcattttttaagagaacttcattgggctgatggtgactatcgacgccagcgatggctcgtgtgggcgagccatcgcagggccggtcatggcatctgcggcagttcctgggggcgcaggtcgaacaccagcacctcggcgtcctcgccctggctcaggcggatctgccgctcatcccgcacccgggcgccgtcgccttcctgcaagcgctggccgttgatttcaacactgccccgggccacatggaggtacacatggcgatcgggcggcaggtccagggtcgcggtttcatcgccgttgaacagcccggcatacacccgtgcgtcctggcgcacgctgagggagccatcggcaccgtccggcgagatgatcaactgcaggcgcccacgtttctgggcctcgctgaagtgttcctgctggtagcgcggttcggcaccggccacggcaggcacgatccagatttgcaggaagtgcacgccacgggtctggctgtggttgaactcgctgtgggccacgccgctgccggcgctcatcagttgcacatcgccggggcggatcaccgagccggtgcccagggtgtccttgtgttccagggcgccttcgagcacataagagaagatctccatgtcgcggtgcgggtgctggccgaagcctttgccggcggcgacacggtcatcgttgatcaccaacaggtcggaaaaccctgttcttgcgggttccagtagttggcgaacgagaaggtgtggaacgacttcaaccaaccgtgattggcggcgccgcgttcggaagctttgcgaagggtcagcatggtcttgtcctcaagtgggagcgggctgcggtatgcagggctccggcgttgagaagaaggttaatggttactgggttattcattaagaagatgaaaactgaataactgtctcgttcaggttgacagtttcgagcgtgtcataatgcccgccgtattccttcccgatggaccttacctgctatgaaaaccgtggccatggcgctgtttccggacttcctgctgctcgatatggccgggccgctcgaggtgttttccattgccaaccgctacctgccggcggcggcgcattaccagatcctcacccttggcaccgagcccggtccgttgcgcgcctccaatggggtagcggtgcagacggacctgctgctggaccaggcccaggacgcctacgatctgctgctggtgcccggtggccccggtgcctataacgaatgtcacccggcactgctgccgtggctgagggccgcggccccacgggcgcggcgcttcggttcgatctgcaccggggcctttgtgctggggcatgccgggctgctggacggtcaccgcgtgaccacgcactggcactacaccgagcgactgatcaaggcgttccccaaggcgagggtcgaaacggatcgcatctacctgcaggacggacgcttgatcacctcgggcggcgtcaccgccggcatcgacctggcgctgtcggtggtggcccaggaccatggcaagcaagtcgccgtggacgtggccaaggtgttgctggtggtgatgaaacgccagggcggccaggcccagttcagcccgatgacggcggcggtggcaccgcaggaaaccacgattacccgggtgcagaaccatgtgctggcgcatctggaccaaccgttcaccatcgagtccatggctgagttggccggcatgagcgcccgccattttgcgcggctgttcgccaaggaagtgcagatgacgcccatggtcttcctgcaaggcgcgcgcatcgaccgcgcccggcagttgctggagaccaccgacctgccgctcaagaccgtggcttttcacgcaggcttcggcagcgtgcggcacatgcgctttctgttcagtgaaaaactgggcctcaacccgacccaataccgacagcagttcagttaacgacagaatgtccgtctcgcgcacccgaatgtccgtgtcgctccctgtgccagcattgtcctgtcacgggtagctggcaagatagcgtcaagcccacggaaaaggatgcgcaaacgcccaaggccgggtgtttcagcgctattgcacatatgaacaatcctcaggcgattgacgctgatggcacggttcgcttcggcgcctatgtgtttcaccggcagcagcggctggtcagcaagtcgggttggccggtgcctgtgggcgggcgtgcactggatatcctcacggtgctgctcgaagcgcccgggcagttcatcagcaaagccaccctgatcgagcgagtctggccgaacagcgtagtggaagaaaacaacctgagggtgcatatcgctgcactgcgccgtgtgctcgatgggcaacagttcattctgaatgaccctctgcgtggttactgtttcgcggcccgcgtacacggtgcgatgccggccgcgctgccacggcacaacctggcgatgcggctcagtgcagtgatcggccgtgacgaggtgttgggcgtgctggttcggcgtctgtccgggcaacacctgatgacgcttaccggatgcgccggtgtcggcaagagcaccctggccctggcattggccgagcgcgtgttgccgcgctaccgggacggcgtgtggtgggttgacctggctaccgtcgaggcgccgctgaccatgttgcgccacttggctgcggcgctgcacctggagccctgcagccacgccagcgaactgtgccgtcaattggtctcgcgccagctgttgctggtgctcgacggtgctgacctgctgctcggcgcctgccggcatctggtgcgtgtgctgcacgacaccgcgcctcaggtcagtgtgctggtgaccagccgcgaaagcctgcaagtccccggtgaatgggtgcaacgcgtgcccaggctggcgatcccagggccgactgcccagggcagtgtcgaacaggcgatggcttacccggcggtgcagttatttgttgcgcgggtgcgtgccagccagcaagggttcgcgctgcgcctgcatgacctggcgccgctgcgggacatctgtcggcgtctggacggtatcccgctggcattggaattggccgccgcccaagtcgatgccctgggcgtgcgcggtttgcagcagcagttgcgcgcaggcttgcaggtgctgacccgaggccggcgcaccgcggtggaacgccaccaatccctgacggcggccctggactggacctaccagcgcctgagcctgccggagcgctggctattcctgcaattggggttgttcaaaatggccgtgaccttgcccacgttgagtgaactggtcgccggtaccgagttggaacacgccgacctgtgctacctgctggggcgcctggttggcacgtcgctgctgactgttgaccccggccctggagacccgcgttaccgcctgctcaattgcgtgcgcagctacgccctggcgcaactgcgcgacccgttgcaggtggcgcgtttgcagcagggctatgggcattacctggggccgttttcaggccggccgtttgtcctgcaactcgtcgagcaggctgcgtacgcggactaggtcctgggtggcaaagccttcggtgaagcgggcgtagatcgaactcagcaagtcgcgcgccgcctgtatgcggccttgcgtctgccacaggcttgccaacgaggttgcacagcgtaattcccaggccagcgcgccttgctggtgcgccaggcccagggcttccagcagcagggcttctgccgcacggctatcggccaggctttcggcgcgcactcgcaggatttccggggtgcaccagccggccgcgccactgctggcgcgctcgaaggccgcgtcactgacctcgattgcattgaaggtcaccaggatatcctcgaccaggcccaacccctgcacatccgcgatgggcagcgtgccctcataacaacgcgcccaggtgtgaaacaactgcaccgagtgcttttgcgcctgttgcagcagctggtcctgatgttcgtgggccatgccgctgtcgccgttatagcgagcgatgaccaccccggccagggccagggtgtagcagatcgacgtgccatggttgatctgcaaggccagcgccagtgcctggcttgcggtacgccatgcgcgctccggataaccgcgcagccacaagatgcgcgcaaggatggtcagggaggcgacgctctggtcgtactgcacgccaaagccatgggtaaagcggttgagatggccgctctgggccatgcgctggatcacttgttcggcattgtgctgcgcgagggcctggtgaccggcgaagtgctgcgccaacacccgcaggcgctgggcactgagggccagcaacggctcggcctgcgggccgagctggtcgaagtgcaggctctgcgccaaggcctcacggtagttgccgcagcacaggttcaccgccatatgccccgacaccgcacgcagctggccggccaggtccttgccggcttccgccaggcgccgcgcgcaactgaacgcttcaatggtctgcggcgtgccgccctgggtgtgataggagaaactgcccagggccagttgcaaggccatgttcaagcgctggctcggcgcattcgattgcccgagtcgtgccagggccttgcccacgtacaagccgtgttcgcgcagcagcgacagctcctgccacaacggcatcgcactcaccgtcaggcgaatgcccagcaggtgcgcaccctggtcgcccaggccccagtcgagggcggcgcggatgtcttcgcgcagcggcgcatagcggtcgatccaggtctgggtcgcgatcagttcccaatcgtcctgcgcctggttcatcagcgccaggcagcgctcggcgtggtgctggcgggtggcgtcgagttcctgggcgacgctgagtttttccagggcataggtgcgggtgatgtccagcaggcggtagaccatctcgtcatcgccggcttccacattgagcaaggacttggcgaccagctgagtgatcgaattcagcacctcgtgcggtgcaatctgctccccggcaatcaccgccgccgcgctggccaggctgaacccgccgcgaaataccgccaggcgacgcaggcagatctgttcgcaggcggtcagcagcgcaaagctccagtccagggtcgcgcgcagggtctgatggcggggcagggcgcttcgccggcctcgggttagcaggcggaagttgtcttccatctgcaccagcagtccgggcaggccgaagcgttcgatctgcgccgccacgagttcgatggccaggggaataccgtccaggcgctggcagatatcaatcgccagcggcagctcggcctcgctcagttcaaagctgtcctgatgggacatggcccgctcgatcaacaattgcagggccgggtagcccagcgcctgggcacggttgccggtggcgggtgggcaggccaggggctccaggcgctgcacgtattcgccctcggcgcgcaaggcctcgcggctggtggccaggatgtgcaagcggggcgcgtggcgcagcagggtttcgctgatcagggcgatgtcgtcgagcacgtgctcgcaattgtcgatcaccagcagcaactggtgctcctgcaagcgccgcgcaaacgtgggcagggcttcgtgctcggcgtgggtgaggtcgagcagggcggcgaggttgggcaggatcatcgacggcgcgctcagtggcgccaggtccagcaagcggatgccgtcgcggtagtgcccgatcagcaattccgcgacccgcagggccaccgtggtcttgccgatgccgccggcgccggtcagggtgataaagcgttgctcgggcagttgctgtaccaggctgtcgatcagggcctggcggccgagcatgcgggtacggcgcagcggcagattgtggcacgggcgttgggcagcaccttcggttggcagggtcatcggctcgatgctcagtggcgcaacaaaactgtagccacgctgggccacggtcacgatatagcgctgcccggcctggccatcgcccaatgccttgcgcaacgccgccatatgcacccgcaggttgccgtcttccaccacgctcctgggccagacgcgggcgatcagctcctgcttgctcaccacattgccggcctgctccagcaggatcagcaggatatccaccgcacgccgccccaggcgcaatgggcgacccgcctccagcaccaggcgctggcgcgggtggatgcggtaggggccgaagtgcacggcctggtcgctgaggtcgttcatgggtggccatgctcggaacggggtgagcggccagcataggccaggcaggccaggaccactaggccgcgatcacttgcggtttagagcgagagtggtgatttcgccaggtcatcgggttgacgccttcgctgcgggtgaacatatgacagaagtgcgcctggtcgcagaagccgcattccaggctgatttgcgtcaggctcaaggatgactgggcgatcagctccttggcccgctggatgcgctgttggcggatccattcctgcggcgacagcccggtggtgcacttgaacgcacgggaaaaatggctgcgcgacagcgcgcaggcctgggcgaggtcggcaatggccaggctttcgccgaggttggccaggatcagctgtttggcgatgcgctcgcgccgtgggcacaggccaccggtggcggacacgcgaggggcgtattgatcgagtcgggccatgacaaatatccgcagtcgatgggagcgttcccggtggatggatgcagtgtagacgtggccaatcttgttgccggaccgtccggctgacgagttaatcgttgttaatttcgccaggtgccgaccaggaaaagacagcacaggcgtgcaatgtggccggcgccttgcgtgtttatctgtgagcttgccaaccgtgtggatatcaccatgaatcgcaacgacctgcgccgcgtcgacatgaacctgctggtgattttcgaggcgttgatgttcgagaagaacctgacccgggtcgccgaaaaactcttcatgggccaaccggcggtgagtgcggcattgggacgtttgcgcgatctgttcgacgacccgttgctgctgcgcaacggccggggcatggagcccacgccacgcgccgtggcgatactcaaggagttgcaaccggccatggacaccatttccggcgcggtcagccgcgcgaaggatttcgacccttccagcagttgtgcggtgtttcgcattggcctttcagacgatgccgaattcggtctgtttccgccgttgctcagtcaactgcgcgaagaggcgccgggcattgtcgtggtggtgcgtcgggccaactatctgttgatgtcgtcattgctggccagcggcgagatttcggtgggggtgagctacaccacggaattgccggcgaatgccaagcgcaagaagctgcgggatattccgtgcaaggtcttgcgtggggatggcggtgttgaaccgctgaccctcgacgactactgcgaacggccccatgcgatggtgtcgttttcgggggacttgagcggcaacatcgacctggacctggcacgcattggtcgtacgcgccgggtggtgttggcggtgccgcagttcagtgggttgcgggcgttgctcgccggtacgcagattattgcgacggtgccggattatgcggcgtgtgcgttgacggaggggacgtcgctacgggcgcaggacccgccgtttgcgattgatgcggcggagttgtcgatggtgtggagtggggtgcatgacaatgatccggcggagcggtggttgagggggaggattggggagcatatggctcgggtggtttgactgggtacatatccgttgcttcggtaacggctacttatggttccggtccgtacagaagagcgcaaaaagtaaccaaaaacgcttcgccccaacactcggcacctcgcctaggctcggtgtgccctcactccggctagcgtgtttgacggggcgccccagatcaagagcaagagcgcggcggccttagagccgaccggattgtatggccggtactcggtcaaagtgtgggagggggcttgcccccgatggcagtgggtcagtcactgatgagttggctgacacaccgccatcgggggcaagccccctcccacagtttgatcttcatgtatcagttgaagggtggtttgc
